(19) United States
(12) Patent Application Publication
(10) Pub. No.: US 2020/0199217 A1
(43) Pub. Date: Jun. 25, 2020

(54) ANTI-IL-36 ANTIBODIES AND METHODS OF USE THEREOF

(71) Applicant: 23andMe, Inc., Sunnyvale, CA (US)

(72) Inventors: Chingwei Vivian LEE, Foster City, CA (US); Germaine FUH-KELLY, Pacifica, CA (US); Louise SCHARF, Pacifica, CA (US); Tina THAI, San Mateo, CA (US); Ashka Bharat PATEL, San Jose, CA (US); Shashank BHARILL, Daly City, CA (US); Erik Edward KARRER, Los Altos, CA (US)

(73) Assignee: 23andMe, Inc., Sunnyvale, CA (US)

(21) Appl. No.: 16/720,541

(22) Filed: Dec. 19, 2019

Related U.S. Application Data
(60) Provisional application No. 62/784,316, filed on Dec. 21, 2018.

(51) Int. Cl. C07K 16/24; A61P 29/00

(52) U.S. Cl. CPC C07K 16/244; A61P 29/00; A61K 38/00; C07K 2317/515; C07K 2317/56

(57) ABSTRACT

The present disclosure provides binding proteins, such as antibodies and antigen-binding fragments, which specifically bind to human IL-36 cytokines, IL-36α, IL-36β, and/or IL-36γ, and block the IL-36 stimulated signaling pathways. Compositions comprising such binding proteins and methods of making and using such binding proteins are also provided.

### CROSS REFERENCE TO RELATED APPLICATIONS

[0001] This application claims the benefit under 35 U.S.C. § 119(e) to U.S. Provisional Patent Application Ser. No. 62/784,316, filed on Dec. 21, 2018, the entirety of which is hereby incorporated herein by reference.

### FIELD OF THE INVENTION

[0002] The present disclosure relates generally to binding proteins, such as antibodies and antigen-binding fragments, which bind to IL-36α, IL-36β, and/or IL-36γ, and methods of using such binding proteins.

### REFERENCE TO SEQUENCE LISTING

[0003] The official copy of the Sequence Listing is submitted concurrently with the specification as an ASCII formatted text file via EFS-Web, with a file name of “09402-004WO1_SeqList_ST25. txt”, a creation date of Dec. 9, 2019, and a size of 1,386,645 bytes. The Sequence Listing filed via EFS-Web is part of the specification and is incorporated in its entirety by reference herein.

### BACKGROUND OF THE INVENTION

[0004] The interleukin-1 (IL-1) family of cytokine ligands and receptors is associated with inflammation, autoimmunity, immune regulation, cell proliferation, and host defense and contributes to the pathology of inflammatory, autoimmune, immune regulatory, degenerative, and cell proliferative (e.g., cancer) diseases and disorders and its cytokine and receptors serve as pathogenic mediators of such diseases and disorders. See, e.g., Cecilia Garlanda et al., Immunity 39:1003-1018 (2013). The IL-1 family of cytokines includes the pro-inflammatory cytokines, interleukin-36 alpha (IL-36 alpha or IL-36α), interleukin-36 beta (IL-36β or IL-36b), and interleukin-36 gamma (IL-36 gamma or IL-36γ). Each of these IL-36 cytokines serves as a ligand capable of binding to the cognate receptor IL-36R (also referred to as “IL1 RL2”) that is expressed on the surface of certain cells, including cells of skin, esophagus, tonsil, lung, gut, brain, and immune cells including T cells. Upon binding of an IL-36 cytokine to IL-36R, an accessory protein co-receptor, ID RAP, is recruited to form a ternary complex comprising the IL-36 cytokine, IL-36R, and ID RAP. This ternary complex facilitates intracellular signal transduction and activation of a set of transcription factors, including NF-κB and AP-1, and mitogen-activated protein kinases, which trigger a cascade of inflammatory and immune responses, including the downstream production of numerous cytokines, chemokines, enzymes, and adhesion molecules, including IFN-γ, TNFα, IL-1α, IL-1β, IL-6, IL-8, IL-12, IL-23, CXCL1, CXCL8, and CCL20.

[0005] The IL-36 cytokines, IL-36α, IL-36β, and IL-36y, are known to be highly expressed in several tissues, including skin and internal epithelial tissues that have been exposed to pathogens. For example, expression of IL-36α, IL-36β and IL-36y is significantly up-regulated in TNF-α-stimulated human keratinocytes (Carrier, et al. (2011) Journal of Investigative Dermatology), and IL-36γ mRNAs are overexpressed in psoriasis skin lesions (D'Erme, et al. (2015) Journal of Investigative Dermatology). Elevated IL-36α mRNA and protein expression also have been observed in chronic kidney disease (Ichii et al, Lab Invest., 90(3): 459-475 (2010)). Additionally, murine bone marrow-derived dendritic cells (BMDCs) and CD4+ T cells respond to IL-36α, IL-36β, and IL-36y by producing proinflammatory cytokines (e.g., IL-12, IL-1β, IL-6, TNF-α, and IL-23) thereby inducing a proinflammatory effect more potently than other IL-1 cytokines (Vigne et al, Blood, 118(22): 5813-5823 (2011)).

[0006] Transgenic mice overexpressing IL-36α in keratinocytes exhibit a transient inflammatory skin disorder at birth that renders mice highly susceptible to a 12-0-tetradecanoylphorbol 13-acetate-induced skin pathology resembling human psoriasis (Blumberg et al, J. Exp. Med., 204(1 1): 2603-2614 (2007); and Blumberg et al, J. Immunol, 755(7):4354-4362 (2010)). Furthermore, IL-36R-deficient mice are protected from imiquimod-induced psoriasiform dermatitis (Tortola et al, J. Clin. Invest., 122(11): 3965-3976 (2012)). These results strongly suggest a role for IL-36 in certain inflammatory disorders of the skin.

[0007] IL-36 cytokines are implicated in certain severe forms of psoriasis, including pustular psoriasis, generalized pustular psoriasis (GPP), and palmo-plantar pustulosis (PPP)) (see, e.g., Town, I E. and Sims, I E., Curr. Opin. Pharmacol, 12(4): 486-90 (2012); and Naik, H. B. and Cowen, E. W., Dermatol Clin., 31(3): 405-425 (2013)). Pustular psoriasis is a rare form of psoriasis characterized by white pustules surrounded by red skin. Generalized pustular psoriasis is a severe, systemic form of pustular psoriasis that has a high risk of fatality, while palmo-plantar pustulosis is a chronic form of pustular psoriasis that affects the palms of the hands and soles of the feet. Current treatments for pustular psoriasis, GPP, and PPP include oral retinoids and topical steroids, but these treatments exhibit poor efficacy and severe side effects.

### SUMMARY OF THE INVENTION

[0008] The present disclosure provides antibodies that specifically bind to IL-36 cytokines with high affinity. The antibodies are capable of decreasing, inhibiting, and/or fully-blocking signaling stimulated by binding of IL-36α, IL-36β, or IL-36γ to their cognate receptor, IL-36R. The present disclosure also provides uses of the anti-IL-36 antibodies in methods of treating IL-36-mediated diseases, such as inflammatory diseases, autoimmune diseases, and cancers including, but not limited to acute generalized exanthematous pustulosis (AGEP), chronic obstructive pulmonary disease (COPD), childhood pustular dermatosis, eczema, generalized pustular psoriasis (GPP), inflammatory bowel disease (IBD), palmoplantar pustular psoriasis (PPP), psoriasis, TNF-induced psoriasis form skin lesions in Crohn's patients, Sjogren's syndrome, and uveitis

[0009] In some embodiments, the present disclosure provides an anti-IL-36 antibody comprising (i) a first light chain hypervariable region (HVR-L1), a second light chain hypervariable region (HVR-L2), and a third light chain hypervariable region (HVR-L3), and/or (ii) a first heavy chain hypervariable region (HVR-H1), a second heavy chain hypervariable region (HVR-H2), and a third heavy chain hypervariable region (HVR-H3), wherein:

[0010] (a) HVR-L1 comprises an amino acid sequence selected from TGSSSNIGAHYDVH (SEQ ID NO: 18), TGSSSNIGAGYDVH (SEQ ID NO: 22), RASQSVSSNYLA (SEQ ID NO: 38), or RASQTIYKYLN (SEQ ID NO: 42);

[0011] (b) HVR-L2 comprises an amino acid sequence selected from SNNNRPS (SEQ ID NO: 15), GNDNRPS (SEQ ID NO: 19), GNTNRPS (SEQ ID NO: 23), GNRNRPS (SEQ ID NO: 27), SASSLQS (SEQ ID NO: 39), or AASSLQS (SEQ ID NO: 43);

[0012] (c) HVR-L3 comprises an amino acid sequence selected from QSYDYSLRGYV (SEQ ID NO: 16), QSYDYSLSGYV (SEQ ID NO: 20), QSYDYSLRVYV (SEQ ID NO: 28), QSYDYSLKAYV (SEQ ID NO: 32), QSYDISLSGWV (SEQ ID NO: 36), QQTYSYPPT (SEQ ID NO: 40), or QQSSIPYT (SEQ ID NO: 44);

[0013] (d) HVR-H1 comprises an amino acid sequence selected from SAYAMHW (SEQ ID NO: 46), STSSYYW (SEQ ID NO: 50), SSTSYYW (SEQ ID NO: 54), GSRSYYW (SEQ ID NO: 58), STYAMSW (SEQ ID NO: 62), TSSNYYW (SEQ ID NO: 66), SSYGMH (SEQ ID NO: 70), SNYAIS (SEQ ID NO: 74), TSTNYYW (SEQ ID NO: 82), TSSNAYW (SEQ ID NO: 86), TASNYYW (SEQ ID NO: 90), TASNTYW (SEQ ID NO: 106), SDSSYYW (SEQ ID NO: 122), SESSYYW (SEQ ID NO: 126), STSSDYW (SEQ ID NO: 130), SNSSYYW (SEQ ID NO: 134), STSSYHW (SEQ ID NO: 142), SRSSYYW (SEQ ID NO: 146), XXXNXYX (SEQ ID NO: 251) wherein X at position 1 is T, D, E, or N; X at position 2 is S, A, E, G, K, Q, R, or T; X at position 3 is S, A, D, E, G, N, P, Q, or T; X at position 5 is Y, A, E, G, H, M, N, Q, S, T, or V; X at position 7 is W, F, I, V, or Y, or XXXXXXW (SEQ ID NO: 336) wherein X at position 1 is S or D; X at position 2 is T, A, D, E, G, H, K, N, P, Q, R, or S; X at position 3 is S, D, E, G, K, N, P, or R; X at position 4 is S, G, K, N, or P; X at position 5 is Y, A, D, E, G, H, M, N, Q, S, T, V, or W; X at position 6 is Y, A, F, G, H, M, N, or Q;

[0014] (e) HVR-H2 comprises an amino acid sequence selected from VISYDGTNEYYAD (SEQ ID NO: 47), SIYYTGNTYYNP (SEQ ID NO: 51), SIHYSGNTYYNP (SEQ ID NO: 55), SIHYSGTTYYNP (SEQ ID NO: 59), GISGGSGYTYYAD (SEQ ID NO: 63), SIDYTGSTYYNP (SEQ ID NO: 67), VISYGGSERYYAD (SEQ ID NO: 71), GILPILGTVDYAQ (SEQ ID NO: 75), NIDYTGSTYYNA (SEQ ID NO: 83), SIDYTGSTAYNP (SEQ ID NO: 87), SIDYTGSTYYNT (SEQ ID NO: 91), SIDYTGSTYYEP (SEQ ID NO: 99), SIDYTGSTYYEP (SEQ ID NO: 103), SIDYTGSTYYQP (SEQ ID NO: 119), SIYYTGNTYYNS (SEQ ID NO: 123), SIYYTGNTYYLP (SEQ ID NO: 131), SIYYTGNTYYMP (SEQ ID NO: 143), SIYYTGNTYYWP (SEQ ID NO: 147), SIYYTGETYYAP (SEQ ID NO: 151), XXDXXXXXXYXX (SEQ ID NO: 284) wherein X at position 1 is S, N, or T; X at position 2 is I, M, or V; X at position 4 is Y, or H; X at position 5 is T, H, L, or N; X at position 6 is G, A, D, E, H, K, N, Q, R, S, or T; X at position 7 is S, A, D, Q, or T; X at position 8 is T, A, D, or E; X at position 9 is Y, A, F, Q, S, or W; X at position 11 is N, D, E, H, P, or Q; X at position 12 is P, A, or E, or XXXXXXXXXYXP (SEQ ID NO: 379) wherein X at position 1 is S, F, I, M, or Q; X at position 2 is I, A, G, L, R, S, T, or V; X at position 3 is Y, A, D, E, F, G, H, K, L, M, N, P, Q, R, S, T, or W; X at position 4 is Y, A, D, E, F, G, H, K, N, P, Q, R, S, T, or W; X at position 5 is T, D, E, K, N, P, or Q; X at position 6 is G or Q; X at position 7 is N, D, E, G, H, I, K, M, P, R, or S; X at position 8 is T, A, E, F, G, H, K, P, Q, R, S, V, W, or Y; X at position 9 is Y or W; X at position 11 is N, A, D, E, K, L, M, P, Q, S or T;

[0015] (f) HVR-H3 comprises an amino acid sequence selected from ARGIRIFTSYFDS (SEQ ID NO: 48), ARVRYGVGVPRYFDP (SEQ ID NO: 52), ARVHYGGYIPRRFDH (SEQ ID NO: 56), ARVAPSYPRVFDY (SEQ ID NO: 60), ARVVTYRDPPASFDY (SEQ ID NO: 64), ARGKYYETYLGFDV (SEQ ID NO: 68), AREPWYSSRGWTGYGFDV (SEQ ID NO: 72), AREPWYRLGAFDV (SEQ ID NO: 76), ATGKYYETYLGFDV (SEQ ID NO: 84), AHGKYYETYLGFDV (SEQ ID NO: 88), ATGSYYETYLGFDV (SEQ ID NO: 100), ATGNYYETYLGFDV (SEQ ID NO: 104), ASGKYYETYLGFDV (SEQ ID NO: 112), ARGNYYETYLGFDV (SEQ ID NO: 120), AGVRYGVGVPRYFDP (SEQ ID NO: 128), SRVRYGVGVPRYFDP (SEQ ID NO: 132), VRVRYGVGVPRYFDP (SEQ ID NO: 144), TRVRYGVGVPRYFDP (SEQ ID NO: 148), ARLRYGVGVPRYFDP (SEQ ID NO: 152), ARVKYGVGVPRYFDP (SEQ ID NO: 156), ARVRYGVGVPRHFDP (SEQ ID NO: 160), AXGXYYXTYLGFDV (SEQ ID NO: 322) wherein X at position 2 is R, A, E, G, H, M, N, Q, S, T, or Y; X at position 4 is K, A, or S; X at position 7 is E or T, or XXXXXGXXVPRXFDP (SEQ ID NO: 462) wherein X at position 1 is A or V; X at position 2 is R, A, G, N, Q, or T; X at position 3 is V, A, F, I, K, L, M, Q, or S; X at position 4 is R, A, I, K, L, M, P, Q, S, T, or V; X at position 5 is Y, H, I, L, or V; X at position 7 is V, A, F, G, K, M, N, Q, R, S, T, W, or Y; X at position 8 is G, N, R, S, or T; X at position 12 is Y, F, H, I, L, M, Q, or R.

[0016] In some embodiments, the anti-IL-36 antibody comprises:

[0017] (a) HVR-L1 comprising the amino acid sequence of SEQ ID NO: 18;

[0018] (b) HVR-L2 comprising the amino acid sequence of SEQ ID NO: 19; and

[0019] (c) HVR-L3 comprising the amino acid sequence of SEQ ID NO: 20.

[0020] In some embodiments, the anti-IL-36 antibody comprises:

[0021] (d) HVR-H1 comprises the amino acid sequence selected from SEQ ID NO: 66, 82, 86, 90, or 252-283;

[0022] (e) HVR-H2 comprises the amino acid sequence selected from SEQ ID NO: 67, 83, 87, 91, 99, 103, 119, or 285-321; and

[0023] (f) HVR-H3 comprises the amino acid sequence selected from SEQ ID NO: 68, 84, 88, 100, 104, 112, 120, or 323-335.

[0024] In some embodiments, the anti-IL-36 antibody comprises:

[0025] (d) HVR-H1 comprises an amino acid sequence selected from SEQ ID NO: 50, 122, 126, 130, 134, 138, 142, 146, or 337-378;

[0026] (e) HVR-H2 comprises an amino acid sequence selected from SEQ ID NO: 51, 123, 131, 143, 147, 151, or 380-461; and

[0027] (f) HVR-H3 comprises an amino acid sequence selected from SEQ ID NO: 52, 128, 132, 144, 148, 152, 156, 160, or 463-513.

[0028] In some embodiments, the anti-IL-36 antibody comprises:

[0029] (a) HVR-L1 comprises the amino acid sequence of SEQ ID NO: 18;

[0030] (b) HVR-L2 comprises the amino acid sequence of SEQ ID NO: 19;

[0031] (c) HVR-L3 comprises the amino acid sequence of SEQ ID NO: 20;

[0032] (d) HVR-H1 comprises the amino acid sequence selected from SEQ ID NO: 66, 82, 86, 90, or 252-283;

[0033] (e) HVR-H2 comprises the amino acid sequence selected from SEQ ID NO: 67, 83, 87, 91, 99, 103, 119, or 285-321; and

[0034] (f) HVR-H3 comprises the amino acid sequence selected from SEQ ID NO: 68, 84, 88, 100, 104, 112, 120, or 323-335.

[0035] In some embodiments, the anti-IL-36 antibody comprises:

[0036] (a) HVR-L1 comprises the amino acid sequence of SEQ ID NO: 18;

[0037] (b) HVR-L2 comprises the amino acid sequence of SEQ ID NO: 19;

[0038] (c) HVR-L3 comprises the amino acid sequence of SEQ ID NO: 20;

[0039] (d) HVR-H1 comprises an amino acid sequence selected from SEQ ID NO: 50, 122, 126, 130, 134, 138, 142, 146, or 337-378;

[0040] (e) HVR-H2 comprises an amino acid sequence selected from SEQ ID NO: 51, 123, 131, 143, 147, 151, or 380-461; and

[0041] (f) HVR-H3 comprises an amino acid sequence selected from SEQ ID NO: 52, 128, 132, 144, 148, 152, 156, 160, or 463-513.

[0042] In some embodiments, the anti-IL-36 antibody comprises a light chain variable domain (V_{L}) amino acid sequence having at least 90% identity to a sequence selected from SEQ ID NO: 13, 17, 21, 25, 29, 33, 37, 41, 77, or 78; and/or a heavy chain variable domain (V_{H}) amino acid sequence having at least 90% identity to a sequence selected from SEQ ID NO: 45, 49, 53, 57, 61, 65, 69, 73, 79, 80, 81, 85, 89, 93, 97, 101, 105, 109, 113, 117, 121, 125, 129, 133, 137, 141, 145, 149, 153, 157, 161, or 165. In some embodiments, the anti-IL-36 antibody comprises a light chain variable domain (V_{L}) amino acid sequence selected from SEQ ID NO: 13, 17, 21, 25, 29, 33, 37, 41, 77, or 78; and/or a heavy chain variable domain (V_{H}) amino acid sequence selected from SEQ ID NO: 45, 49, 53, 57, 61, 65, 69, 73, 79, 80, 81, 85, 89, 93, 97, 101, 105, 109, 113, 117, 121, 125, 129, 133, 137, 141, 145, 149, 153, 157, 161, or 165.

[0043] In some embodiments, the anti-IL-36 antibody comprises a light chain variable domain (V_{L}) amino acid sequence having at least 90% identity to SEQ ID NO: 17 or 77; and/or a heavy chain variable domain (V_{H}) amino acid sequence having at least 90% identity to a sequence selected from SEQ ID NO: 49, 65, 79, 80, 81, 85, 89, 93, 97, 101, 105, 109, 113, 117, 121, 125, 129, 133, 137, 141, 145, 149, 153, 157, 161, or 165. In some embodiments, the anti-IL-36 antibody comprises a light chain variable domain (V_{L}) amino acid sequence of SEQ ID NO: 17 or 77; and/or a heavy chain variable domain (V_{H}) amino acid sequence selected from SEQ ID NO: 49, 65, 79, 80, 81, 85, 89, 93, 97, 101, 105, 109, 113, 117, 121, 125, 129, 133, 137, 141, 145, 149, 153, 157, 161, or 165.

[0044] In some embodiments, the anti-IL-36 antibody comprises a light chain variable domain (V_{L}) amino acid sequence having at least 90% identity to SEQ ID NO: 17 or 77; and/or a heavy chain variable domain (V_{H}) amino acid sequence having at least 90% identity to a sequence selected from SEQ ID NO: 65, 80, 81, 85, 89, 93, 97, 101, 105, 109, 113, or 117. In some embodiments, the anti-IL-36 antibody comprises a light chain variable domain (V_{L}) amino acid sequence of SEQ ID NO: 17 or 77; and/or a heavy chain variable domain (V_{H}) amino acid sequence selected from SEQ ID NO: 65, 80, 81, 85, 89, 93, 97, 101, 105, 109, 113, or 117.

[0045] In some embodiments, the anti-IL-36 antibody comprises a light chain variable domain (V_{L}) amino acid sequence having at least 90% identity to SEQ ID NO: 17 or 77; and/or a heavy chain variable domain (V_{H}) amino acid sequence having at least 90% identity to a sequence selected from SEQ ID NO: 49, 79, 121, 125, 129, 133, 137, 141, 145, 149, 153, 157, 161, or 165. In some embodiments, the anti-IL-36 antibody comprises a light chain variable domain (V_{L}) amino acid sequence of SEQ ID NO: 17 or 77; and/or a heavy chain variable domain (V_{H}) amino acid sequence selected from SEQ ID NO: 49, 79, 121, 125, 129, 133, 137, 141, 145, 149, 153, 157, 161, or 165.

[0046] In some embodiments, the anti-IL-36 antibody comprises a light chain (LC) amino acid sequence having at least 90% identity to SEQ ID NO: 169 or 242; and/or a heavy chain (HC) amino acid sequence having at least 90% identity to a sequence selected from SEQ ID NO: 170-202, 248, 249, or 250. In some embodiments, the anti-IL-36 antibody comprises a light chain (LC) amino acid sequence of SEQ ID NO: 169 or 242; and/or a heavy chain (HC) amino acid sequence selected from SEQ ID NO: 170-202, 248, 249, or 250.

[0047] In some embodiments, the anti-IL-36 antibody comprises a light chain (LC) amino acid sequence having at least 90% identity to SEQ ID NO: 169 or 242; and/or a heavy chain (HC) amino acid sequence having at least 90% identity to a sequence selected from SEQ ID NO: 518-616, and 743-751. In some embodiments, the anti-IL-36 antibody comprises a light chain (LC) amino acid sequence of SEQ ID NO: 169 or 242; and/or a heavy chain (HC) amino acid sequence of SEQ ID NO: 518-616, and 743-751.

[0048] In some embodiments, the anti-IL-36 antibody comprises a light chain (LC) amino acid sequence having at least 90% identity to SEQ ID NO: 169 or 242; and/or a heavy chain (HC) amino acid sequence having at least 90% identity to a sequence selected from SEQ ID NO: 203-241. In some embodiments, the anti-IL-36 antibody comprises a light chain (LC) amino acid sequence having of SEQ ID NO: 169 or 242; and/or a heavy chain (HC) amino acid sequence selected from SEQ ID NO: 203-241.

[0049] In some embodiments, the anti-IL-36 antibody comprises a light chain (LC) amino acid sequence having at least 90% identity to SEQ ID NO: 169 or 242; and/or a heavy chain (HC) amino acid sequence having at least 90% identity to a sequence selected from SEQ ID NO: 617-733. In some embodiments, the anti-IL-36 antibody comprises a light chain (LC) amino acid sequence having of SEQ ID NO: 169 or 242; and/or a heavy chain (HC) amino acid sequence selected from SEQ ID NO: 617-733.

[0050] In some embodiments, the present disclosure provides an anti-IL-36 antibody wherein the antibody is a multispecific antibody comprising:

[0051] (a) a pair of light chains each comprising: HVR-L1 sequence of SEQ ID NO: 18; HVR-L2 sequence of SEQ ID NO: 19; and HVR-L3 sequence of SEQ ID NO: 20;

[0052] (b) a heavy chain comprising: HVR-H1 sequence selected from SEQ ID NOs: 66, 82, 86, 90, or 106; HVR-H2 sequence selected from SEQ ID NOs: 67, 83, 87, 91, 99, 103, or 119; and HVR-H3 sequence selected from SEQ ID NOs: 68, 84, 88, 100, 104, 112, or 120; and

[0053] (c) a heavy chain comprising: HVR-H1 sequence selected from SEQ ID NOs: 50, 122, 126, 130, 134, 142, or 146; HVR-H2 sequence selected from SEQ ID NOs: 51, 123, 127, 131, 135, 139, 143, 147, or 151; and HVR-H3 comprises an amino acid sequence selected from SEQ ID NOs: 52, 128, 132, 144, 148, 152, 156, or 160.

[0054] In some embodiments, the multispecific antibody comprises:

[0055] one of the heavy chains comprising an amino acid substitution T366W, and the other heavy chain comprising amino acid substitutions T366S, L368A and Y407V.

[0056] In some embodiments, the multispecific antibody comprises:

[0057] (a) a pair of light chains each comprising a light chain variable domain (V_{L}) amino acid sequence of SEQ ID NO: 17 or 77;

[0058] (b) a heavy chain comprising a heavy chain variable domain (V_{H}) amino acid sequence selected from SEQ ID NO: 65, 80, 81, 85, 89, 93, 97, 101, 105, 109, 113, or 117; and

[0059] (c) a heavy chain comprising a heavy chain variable domain (V_{H}) amino acid sequence selected from SEQ ID NO: 49, 79, 121, 125, 129, 133, 137, 141, 145, 149, 153, 157, 161, or 165.

[0060] In some embodiments, the multispecific antibody comprises:

[0061] (a) a pair of light chain (LC) amino acid sequences of SEQ ID NO: 169 and 242;

[0062] (b) a heavy chain (HC) amino acid sequence selected from SEQ ID NO: 171, 174, 177, 180, 183, 186, 189, 192, 195, 198, 201, 249, 521, 522, 523, 530, 531, 532, 539, 540, 541, 548, 549, 550, 557, 558, 559, 566, 567, 568, 575, 576, 577, 584, 585, 586, 593, 594, 595, 602, 603, 604, 611, 612, and 613; and

[0063] (c) a heavy chain (HC) amino acid sequence selected from SEQ ID NO: 208, 211, 214, 217, 220, 223, 226, 229, 232, 235, 238, 241, 632, 633, 634, 641, 642, 643, 650, 651, 652, 659, 660, 661, 668, 669, 670, 677, 678, 679, 686, 687, 688, 695, 696, 697, 704, 705, 706, 713, 714, 715, 722, 723, 724, 731, 732, and 733.

[0064] In some embodiments, the multispecific antibody comprises:

[0065] (a) a pair of light chain (LC) amino acid sequences of SEQ ID NO: 169 and 242;

[0066] (b) a heavy chain (HC) amino acid sequence selected from SEQ ID NO: 172, 175, 178, 181, 184, 187, 190, 193, 196, 199, 202, 250, 524, 525, 526, 533, 534, 535, 542, 543, 544, 551, 552, 553, 560, 561, 562, 569, 570, 571, 578, 579, 580, 587, 588, 589, 596, 597, 598, 605, 606, 607, 614, 615, 616, 749, 750, and 751; and

[0067] (c) a heavy chain (HC) amino acid sequence selected from SEQ ID NO: 207, 210, 213, 216, 219, 222, 225, 228, 231, 234, 237, 240, 629, 630, 631, 638, 639, 640, 647, 648, 649, 656, 657, 658, 665, 666, 667, 674, 675, 676, 683, 684, 685, 692, 693, 694, 701, 702, 703, 710, 711, 712, 719, 720, 721, 728, 729, and 730.

[0068] In some embodiments, the present disclosure provides a multispecific anti-IL-36 antibody, wherein the antibody comprises a pair of light chain (LC) amino acid sequences of SEQ ID NO: 169; a heavy chain (HC) amino acid sequence selected from SEQ ID NO: 192, 584, 585, and 586; and a heavy chain (HC) amino acid sequence selected from SEQ ID NO: 235, 713, 714, and 715.

[0069] In various embodiments of the anti-IL-36 antibodies provided by the present disclosure, the antibody is characterized by one or more of the following properties:

[0070] (a) binds to hu-IL-36α, hu-IL-36-β, and/or hu-IL-36-γ with a binding affinity of 1×10⁻⁸ M or less, 1×10⁻⁹M or less, 1×10⁻¹⁰ M or less, or 1×10⁻¹¹M or less; optionally, wherein the antibody is multispecific;

[0071] (b) binds to hu-IL-36α and hu-IL-36-γ with a binding affinity of 1×10⁻⁸ M or less, 1×10⁻⁹ M or less, 1×10⁻¹⁰ M or less, or 1×10⁻¹¹M or less;

[0072] (c) binds to hu-IL-36-β with a binding affinity of 1×10⁻⁸ M or less, 1×10⁻⁹M or less, 1×10⁻¹⁰ M or less, or 1×10⁻¹¹M or less;

[0073] (d) is multispecific and comprises a specificity for IL-36α and/or IL-36γ in one arm, and a specificity for IL-36β in the other arm; optionally, wherein one arm binds to hu-IL-36α and hu-IL-36-γ with a binding affinity of 1×10⁻⁸ M or less, 1×10⁻⁹M or less, 1×10⁻¹⁰ M or less, or 1×10⁻¹¹M or less, and the other arm binds to hu-IL-36-β with a binding affinity of 1×10⁻⁸M or less, 1×10⁻⁹M or less, 1×10⁻¹⁰ M or less, or 1×10⁻¹¹M or less;

[0074] (e) decreases an intracellular signal stimulated by IL-36α, IL-36β, and/or IL-36γ by at least 90%, at least 95%, at least 99%, or 100%; optionally, wherein at an IL-36α, IL-36β, and/or IL-36γ concentration of about EC₅₀ the antibody has an IC₅₀ of 10 nM or less, 5 nM or less, or 1 nM or less; optionally, wherein the antibody is multispecific;

[0075] (f) inhibits release of IL-8 from primary human keratinocytes (PHKs) stimulated by IL-36α, IL-36β, and/or IL-36γ, optionally, wherein at an IL-36α, IL-36β, and/or IL-36γ concentration of about EC₅₀ the antibody has an IC₅₀ of 10 nM or less, 5 nM or less, or 1 nM or less; optionally, wherein the antibody is multispecific; and/or

[0076] (g) cross-reacts with an IL-36α, IL-36β, or IL-36γ of cynomolgus monkey of SEQ ID NO: 5, 6, or 7; optionally, wherein the antibody is multispecific.

[0077] The present disclosure also provides embodiments of the anti-IL-36 antibody, wherein: (i) the antibody is a monoclonal antibody; (ii) the antibody is a human, humanized, or chimeric antibody; (iii) the antibody is a full length antibody of class IgG, optionally, wherein the class IgG antibody has an isotype selected from IgG1, IgG2, IgG3, and IgG4; (iv) the antibody is an Fc region variant, optionally an Fc region variant that alters effector function (e.g., a variant resulting in an effectorless antibody), or an Fc region variant the alters antibody half-life; (v) the antibody is an antibody fragment, optionally selected from the group consisting of F(ab′)₂, Fab′, Fab, Fv, single domain antibody (VHH), and scFv; (vi) the antibody is an immunoconjugate, optionally, wherein the immunoconjugate comprises a therapeutic agent for treatment of an IL-36-mediated disease; (vii) the antibody is a multi-specific antibody, optionally a multispecific antibody; and (viii) the antibody is a synthetic antibody, wherein the HVRs are grafted onto a scaffold or framework other than an immunoglobulin scaffold or framework; optionally, a scaffold selected from an alternative protein scaffold and an artificial polymer scaffold.

[0078] In other embodiments, the present disclosure provides isolated nucleic acids encoding the anti-IL-36 antibodies disclosed herein. In some embodiments, the present disclosure also provides a host cell comprising a nucleic acid encoding an anti-IL-36 antibody as disclosed herein. The disclosure also provides a method of producing an anti-IL-36 antibody, wherein the method comprises culturing a host cell comprising a nucleic acid (or vector) encoding an anti-IL-36 antibody so that an antibody is produced.

[0079] In some embodiments, the disclosure provides a pharmaceutical composition comprising an anti-IL-36 antibody as disclosed herein and a pharmaceutically acceptable carrier. In some embodiments, the pharmaceutical composition comprises an anti-IL-36 antibody as the sole active agent; optionally, wherein the anti-IL-36 antibody is a multispecific antibody comprising a specificity for IL-36α and/or IL-36γ in one arm, and a specificity for IL-36β in the other arm. In some embodiments, the pharmaceutical composition further comprises a therapeutic agent for treatment of an IL-36-mediated disease or condition.

[0080] In some embodiments, the present disclosure provides a method of treating an IL-36-mediated disease or condition in a subject, comprising administering to the subject a therapeutically effective amount of an anti-IL-36 antibody as disclosed herein, or a therapeutically effective amount of a pharmaceutical composition of an anti-IL-36 antibody as disclosed herein. In some embodiments, the uses and methods of treatment comprise administering a pharmaceutical composition comprising an anti-IL-36 antibody as the sole active agent; optionally, wherein the anti-IL-36 antibody is a multispecific antibody comprising a specificity for IL-36α and/or IL-36γ in one arm, and a specificity for IL-36β in the other arm.

[0081] In some embodiments of the uses and methods of treatment disclosed herein, the IL-36-mediated disease is selected from an inflammatory disease, an autoimmune disease, and a cancer. In some embodiments, the IL-36-mediated disease is selected from: acne due to epidermal growth factor receptor inhibitors, acne and suppurative hidradenitis (PASH), acute generalized exanthematous pustulosis (AGEP), amicrobial pustulosis of the folds, amicrobial pustulosis of the scalp/leg, amicrobial subcorneal pustulosis, aseptic abscess syndrome, Behçet's disease, bowel bypass syndrome, chronic obstructive pulmonary disease (COPD), childhood pustular dermatosis, Crohn's disease, deficiency of the interleukin-1 receptor antagonist (DIRA), deficiency of interleukin-36 receptor antagonist (DITRA), eczema, generalized pustular psoriasis (GPP), erythema elevatum diutinum, hidradenitis suppurativa, IgA pemphigus, inflammatory bowel disease (IBD), neutrophilic panniculitis, palmoplantar pustular psoriasis (PPP), psoriasis, psoriatic arthritis, pustular psoriasis (DIRA, DITRA), pyoderma gangrenosum, pyogenic arthritis pyoderma gangrenosum and acne (PAPA), pyogenic arthritis pyoderma gangrenosum acne and suppurative hidradenitis (PAPASH), rheumatoid neutrophilic dermatosis, synovitis acne pustulosis hyperostosis and osteitis (SAPHO), TNF-induced psoriasis form skin lesions in Crohn's patients, Sjogren's syndrome, Sweet's syndrome, systemic lupus erythematosus (SLE), ulcerative colitis, and uveitis. In some embodiments, the IL-36-mediated disease is selected from generalized pustular psoriasis (GPP), palmoplantar pustular psoriasis (PPP), and psoriasis. In some embodiments, the IL-36-mediated disease is a cancer; optionally, a cancer selected from breast cancer, colorectal cancer, non-small cell lung cancer, and pancreatic cancer.

### BRIEF DESCRIPTION OF THE FIGURES

[0082] FIG. 1A, FIG. 1B, and FIG. 1C depict plots of results for the yeast display-derived anti-hu-IL-36 antibodies mAb2.0 and mAb6.0 in inhibition assays of IL-36-stimulated intracellular signaling in the HaCat human keratinocyte cell line. FIG. 1A: mAb2.0 inhibition of IL-36α stimulation ([IL-36α]=1.2 nM) of HaCat cells; IC₅₀=0.28 nM. FIG. 1B: mAb6.0 inhibition of IL-368 stimulation ([IL-36β]=0.175 nM) of HaCat cells; IC₅₀=0.082 nM. FIG. 1C: mAb2.0 inhibition of IL-36γ stimulation ([IL-36γ]=4 nM) of HaCat cells; IC₅₀=1.23 nM. All assays were performed at an agonist concentration of about EC₅₀; error bars shown are representative of the standard deviation from duplicate samples. The negative control (NC, shown as a grey, dotted line), represents cells exposed to growth medium only, while the positive control (PC, shown as a grey, dashed line) represents cells exposed to the agonist only (in the absence of antagonistic or control antibodies).

[0083] FIG. 2A, FIG. 2B, and FIG. 2C depict plots of results for the yeast display-derived anti-hu-IL-36 antibodies mAb2.0 and mAb6.0 in inhibition assays of IL-36-stimulated intracellular signaling in primary human neonatal pooled keratinocytes (HEKn). FIG. 2A: mAb2.0 inhibition of IL-36α stimulation ([IL-36α]=1.2 nM) of HEKn cells; IC₅₀=0.33 nM. FIG. 2B: mAb6.0 inhibition of IL-36β stimulation ([IL-36β]=0.3 nM) of HEKn cells; IC₅₀=1.75 nM. FIG. 2C: mAb2.0 inhibition of IL-36γ stimulation ([IL-36γ]=7 nM) of HEKn cells; IC₅₀=2.27 nM. All assays were performed at an agonist concentration of about EC₅₀; error bars shown are representative of the standard deviation from duplicate samples. The negative control (NC, shown as a grey, dotted line), represents cells exposed to growth medium only, while the positive control (PC, shown as a grey, dashed line) represents cells exposed to the agonist only (in the absence of antagonistic or control antibodies).

[0084] FIG. 3A, FIG. 3B, and FIG. 3C depict plots of results for the anti-hu-IL-36 multispecific antibody mAb2.10/mAb6_2.7 in inhibition assays of IL-36-stimulated intracellular signaling in the HaCat human keratinocyte cell line. FIG. 3A: mAb2.10/mAb6_2.7 inhibition of IL-36α stimulation ([IL-36α]=0.8 nM) of HaCat cells; IC₅₀=0.38 nM. FIG. 3B: mAb2.10/mAb6_2.7 inhibition of IL-36β stimulation ([IL-36β]=0.15 nM) of HaCat cells; IC₅₀=0.13 nM. FIG. 3C: mAb2.10/mAb6_2.7 inhibition of IL-36γ stimulation ([IL-36γ]=2 nM) of HaCat cells; IC₅₀=1.1 nM. All assays were performed at an agonist concentration of about EC₅₀; error bars shown are representative of the standard deviation from duplicate samples. The negative control (NC, shown as a grey, dotted line), represents cells exposed to growth medium only, while the positive control (PC, shown as a grey, dashed line) represents cells exposed to the agonist only (in the absence of antagonistic or control antibodies).

[0085] FIG. 4A, FIG. 4B, and FIG. 4C depict plots of results for the anti-hu-IL-36 multispecific antibody mAb2.10/mAb6_2.7 in inhibition assays of IL-36-stimulated intracellular signaling in primary human adult keratinocytes (HEKa). FIG. 4A: mAb2.10/mAb6_2.7 inhibition of IL-36α stimulation ([IL-36α]=1.1 nM) of HEKa cells; IC₅₀=0.56 nM. FIG. 4B: mAb2.10/mAb6_2.7 inhibition of IL-36β stimulation ([IL-36β]=0.15 nM) of HEKa cells; IC₅₀=0.11 nM. FIG. 4C: mAb2.10/mAb6_2.7 inhibition of IL-36γ stimulation ([IL-36γ]=3.6 nM) of HEKa cells; IC₅₀=2.7 nM. All assays were performed at an agonist concentration of about EC₅₀; error bars shown are representative of the standard deviation from duplicate samples. The negative control (NC, shown as a grey, dotted line), represents cells exposed to growth medium only, while the positive control (PC, shown as a grey, dashed line) represents cells exposed to the agonist only (in the absence of antagonistic or control antibodies).

### DETAILED DESCRIPTION

[0086] The present disclosure provides antibodies, including multispecific antibodies, that specifically bind human the hu-IL-36 cytokines, IL-36α, IL-36β, and IL-36γ with high affinity. The disclosed anti-IL-36 antibodies are capable of decreasing, inhibiting, and/or fully-blocking intracellular signaling by IL-36-mediated pathways, including signaling stimulated by binding of IL-36α, IL-36β, or IL-36γ to its cognate receptor, IL-36R. The present disclosure also provides uses of the anti-IL-36 antibodies in methods of treating IL-36-mediated diseases, such as inflammatory diseases, autoimmune diseases, and cancers, specifically including, but not limited to acute generalized exanthematous pustulosis (AGEP), chronic obstructive pulmonary disease (COPD), childhood pustular dermatosis, eczema, generalized pustular psoriasis (GPP), inflammatory bowel disease (IBD), palmoplantar pustular psoriasis (PPP), psoriasis, TNF-induced psoriasis form skin lesions in Crohn's patients, Sjogren's syndrome, uveitis.

[0087] Overview of Terminology and Techniques

[0088] For the descriptions herein and the appended claims, the singular forms “a”, and “an” include plural referents unless the context clearly indicates otherwise. Thus, for example, reference to “a protein” includes more than one protein, and reference to “a compound” refers to more than one compound. It is further noted that the claims may be drafted to exclude any optional element. As such, this statement is intended to serve as antecedent basis for use of such exclusive terminology as “solely,” “only” and the like in connection with the recitation of claim elements, or use of a “negative” limitation. The use of “comprise,” “comprises,” “comprising” “include,” “includes,” and “including” are interchangeable and not intended to be limiting. It is to be further understood that where descriptions of various embodiments use the term “comprising,” those skilled in the art would understand that in some specific instances, an embodiment can be alternatively described using language “consisting essentially of” or “consisting of.”

[0089] Where a range of values is provided, unless the context clearly dictates otherwise, it is understood that each intervening integer of the value, and each tenth of each intervening integer of the value, unless the context clearly dictates otherwise, between the upper and lower limit of that range, and any other stated or intervening value in that stated range, is encompassed within the invention. The upper and lower limits of these smaller ranges may independently be included in the smaller ranges, and are also encompassed within the invention, subject to any specifically excluded limit in the stated range. Where the stated range includes one or both of these limits, ranges excluding (i) either or (ii) both of those included limits are also included in the invention. For example, “1 to 50,” includes “2 to 25,” “5 to 20,” “25 to 50,” “1 to 10,” etc.

[0090] Generally, the nomenclature used herein and the techniques and procedures described herein include those that are well understood and commonly employed by those of ordinary skill in the art, such as the common techniques and methodologies described in Sambrook et al., Molecular Cloning-A Laboratory Manual (2nd Ed.), Vols. 1-3, Cold Spring Harbor Laboratory, Cold Spring Harbor, N.Y., 1989 (hereinafter “Sambrook”); Current Protocols in Molecular Biology, F. M. Ausubel et al., eds., Current Protocols, a joint venture between Greene Publishing Associates, Inc. and John Wiley & Sons, Inc. (supplemented through 2011) (hereinafter “Ausubel”); Antibody Engineering, Vols. 1 and 2, R. Kontermann and S. Dubel, eds., Springer-Verlag, Berlin and Heidelberg (2010); Monoclonal Antibodies: Methods and Protocols, V. Ossipow and N. Fischer, eds., 2nd Ed., Humana Press (2014); Therapeutic Antibodies: From Bench to Clinic, Z. An, ed., J. Wiley & Sons, Hoboken, N.J. (2009); and Phage Display, Tim Clackson and Henry B. Lowman, eds., Oxford University Press, United Kingdom (2004).

[0091] All publications, patents, patent applications, and other documents referenced in this disclosure are hereby incorporated by reference in their entireties for all purposes to the same extent as if each individual publication, patent, patent application or other document were individually indicated to be incorporated by reference herein for all purposes.

[0092] Unless defined otherwise, all technical and scientific terms used herein have the same meaning as commonly understood by one of ordinary skill in the art to which the present invention pertains. It is to be understood that the terminology used herein is for describing particular embodiments only and is not intended to be limiting. For purposes of interpreting this disclosure, the following description of terms will apply and, where appropriate, a term used in the singular form will also include the plural form and vice versa.

[0093] “IL-36,” as used herein, refers to the interleukin-36 cytokines IL-36α, IL-36β, and IL-36γ, collectively.

[0094] “IL-36α” or “IL-36a” as used herein, refers to the interleukin-36α cytokine from any species in which it occurs. “hu-IL-36α” and “cy-IL-36α” refer to the IL-36α cytokine from humans and cynomolgus monkey, respectively.

[0095] “IL-36β” or “IL-36b” as used herein, refers to the interleukin-36β cytokine from any species in which it occurs. “hu-IL-36β” and “cy-IL-36β” refer to the IL-36β cytokine from humans and cynomolgus monkey, respectively.

[0096] “IL-36γ” or “IL-36g” as used herein, refers to the interleukin-36γ cytokine from any species in which it occurs. “hu-IL-36γ” and “cy-IL-36γ” refer to the IL-36γ cytokine from humans and cynomolgus monkey, respectively.

[0097] “IL-36 mediated condition” or “IL-36 mediated disease,” as used herein, encompasses any medical condition associated with aberrant function of the signaling pathways mediated by binding of any of the IL-36 cytokines, IL-36α, IL-36β, and IL-36γ, to their cognate receptor IL-36R, including but not limited to, the downstream pathways known to be stimulated by the IL-36 cytokines that result in the production of cytokines, chemokines, enzymes, and adhesion molecules, including but not limited to IFN-γ, TNFα, IL-1α, IL-1β, IL-6, IL-8, IL-12, IL-23, CXCL1, CXCL8, and CCL20. For example, IL-36 mediated diseases can include, but are not limited to, diseases mediated by and/or responsive to antagonists or inhibitors of the IL-36 signaling pathways including inflammatory diseases, autoimmune diseases, and cancers. More specifically, IL-36 mediated diseases can include but are not limited to acne due to epidermal growth factor receptor inhibitors, acne and suppurative hidradenitis (PASH), acute generalized exanthematous pustulosis (AGEP), amicrobial pustulosis of the folds, amicrobial pustulosis of the scalp/leg, amicrobial subcorneal pustulosis, aseptic abscess syndrome, Behçet's disease, bowel bypass syndrome, chronic obstructive pulmonary disease (COPD), childhood pustular dermatosis, Crohn's disease, deficiency of the interleukin-1 receptor antagonist (DIRA), deficiency of interleukin-36 receptor antagonist (DITRA), eczema, generalized pustular psoriasis (GPP), erythema elevatum diutinum, hidradenitis suppurativa, IgA pemphigus, inflammatory bowel disease (IBD), neutrophilic panniculitis, palmoplantar pustular psoriasis (PPP), psoriasis, psoriatic arthritis, pustular psoriasis (DIRA, DITRA), pyoderma gangrenosum, pyogenic arthritis pyoderma gangrenosum and acne (PAPA), pyogenic arthritis pyoderma gangrenosum acne and suppurative hidradenitis (PAPASH), rheumatoid neutrophilic dermatosis, synovitis acne pustulosis hyperostosis and osteitis (SAPHO), TNF-induced psoriasis form skin lesions in Crohn's patients, Sjogren's syndrome, Sweet's syndrome, systemic lupus erythematosus (SLE), ulcerative colitis, and uveitis.

[0098] “IL-36 stimulated signal,” as used herein, refers to an intracellular signal initiated by binding any of the IL-36 cytokines, IL-36α, IL-36β, or IL-36γ, to its cognate receptor, IL-36R. Exemplary IL-36 stimulated signals include the release of IL-8 from HaCat cells and/or primary human adult or neonatal keratinocyte (HEKn or HEKa) cells, as well as signals measured using surrogate cell-based blocking assays, such as a HEK-BLUE™ IL-36 responsive cell-based assay as disclosed in the Examples herein.

[0099] “Cell-based blocking assay” refers to an assay in which the ability of an antibody to inhibit or reduce the biological activity of the antigen it binds can be measured. For example, a cell-based blocking assay can be used to measure the concentration of antibody required to inhibit a specific biological or biochemical function, such as IL-36 cytokine mediated intracellular signaling. In some embodiments, the half maximal inhibitory concentration (IC₅₀) and/or 90% inhibitory concentration (IC₉₀) of an antibody (e.g., an anti-IL-36 antibody of the disclosure) is measured using a cell-based blocking assay. In some embodiments, the cell-based blocking assay is used to determine whether an antibody blocks the interaction between an agonist (e.g., IL-36α, IL-36β, IL-36γ) and its cognate receptor. Cell-based blocking assays useful with the antibodies of the present disclosure can include cell-line based assays (e.g., HaCat cells) or primary cell assays (e.g., primary human keratinocytes) as well as reporter or sensor cell assays (e.g., a HEK-BLUE™ reporter cell assay). Exemplary cell-based blocking assays for the IL-36 signaling pathways are described in the Examples provided herein.

[0100] “Antibody,” as used herein, refers to a molecule comprising one or more polypeptide chains that specifically binds to, or is immunologically reactive with, a particular antigen. Exemplary antibodies of the present disclosure include monoclonal antibodies, polyclonal antibodies, chimeric antibodies, humanized antibodies, human antibodies, multispecific (or heteroconjugate) antibodies (e.g., trispecific antibodies, bispecific antibodies, etc.), monovalent antibodies (e.g., single-arm antibodies), multivalent antibodies, antigen-binding fragments (e.g., Fab′, F(ab′)₂, Fab, Fv, rlgG, and scFv fragments), antibody fusions, and synthetic antibodies (or antibody mimetics).

[0101] “Anti-IL-36 antibody” or “antibody that binds IL-36” refers to an antibody that binds IL-36, including one or more of IL-36α, IL-36β, and IL-36γ, with sufficient affinity such that the antibody is useful as a diagnostic and/or therapeutic agent in targeting IL-36, i.e., one or more of IL-36α, IL-36β, and IL-36γ. In some embodiments, the extent of binding of an anti-IL-36 antibody to an unrelated, non-IL-36 antigen is less than about 10% of the binding of the antibody to IL-36 as measured, e.g., by a radioimmunoassay (RIA), by Surface plasmon resonance (SPR), or the like. In some embodiments, an antibody that binds to IL-36 has a dissociation constant (K_{D}) of <1 μM, <100 nM, <10 nM, <1 nM, <0.1 nM, <0.01 nM, or <1 μM (e.g., 10⁻⁸ M or less, e.g., from 10⁻⁸ M to 10⁻¹³ M, e.g., from 10⁻⁹ M to 10⁻¹³ M).

[0102] “Full-length antibody,” “intact antibody,” or “whole antibody” are used herein interchangeably to refer to an antibody having a structure substantially similar to a native antibody structure or having heavy chains that contain an Fc region as defined herein.

[0103] “Antibody fragment” refers to a portion of a full-length antibody which is capable of binding the same antigen as the full-length antibody. Examples of antibody fragments include, but are not limited to, Fv, Fab, Fab′, Fab′-SH, F(ab′)₂; diabodies; linear antibodies; monovalent, or single-armed antibodies; single-chain antibody molecules (e.g., scFv); and multispecific antibodies formed from antibody fragments.

[0104] “Class” of an antibody refers to the type of constant domain or constant region possessed by its heavy chain. There are five major classes of antibodies: IgA, IgD, IgE, IgG, and IgM, and several of these are further divided into subclasses (isotypes), e.g., IgG1, IgG2, IgG3, IgG4, IgA1, and IgA2. The heavy chain constant domains that correspond to the different classes of immunoglobulins are called α, δ, ε, γ, and μ, respectively.

[0105] “Variable region” or “variable domain” refers to the domain of an antibody heavy or light chain that is involved in binding the antibody to antigen. The variable domains of the heavy chain and light chain (V_{H} and V_{L}, respectively) of a native antibody generally have similar structures, with each domain comprising four conserved framework regions (FRs) and three hypervariable regions (HVRs) (see, e.g., Kindt et al., Kuby Immunology, 6^{th} ed., W.H. Freeman and Co., page 91). A single V_{H} or V_{L} domain may be sufficient to confer antigen-binding specificity. Furthermore, antibodies that bind a particular antigen may be isolated using a V_{H} or V_{L} domain from an antibody that binds the antigen to screen a library of complementary V_{L} or V_{H} domains, respectively (see, e.g., Portolano et al., J. Immunol. 150:880-887 (1993); Clarkson et al., Nature 352:624-628 (1991)).

[0106] “Hypervariable region” or “HVR,” as used herein, refers to each of the regions of an antibody variable domain which are hypervariable in sequence and/or form structurally defined loops (“hypervariable loops”). Generally, native antibodies comprise four chains with six HVRs; three in the heavy chain variable domain, V_{H} (HVR-H1, HVR-H2, HVR-H3), and three in the light chain variable domain, V_{L} (HVR-L1, HVR-L2, HVR-L3). The HVRs generally comprise amino acid residues from the hypervariable loops and/or from the “complementarity determining regions” (CDRs). A number of hypervariable region delineations are in use and are encompassed herein. The Kabat Complementarity Determining Regions (CDRs) are based on sequence variability and are the most commonly used (Kabat et al., Sequences of Proteins of Immunological Interest, 5th Ed. Public Health Service, National Institutes of Health, Bethesda, Md. (1991)). Chothia refers instead to the location of the structural loops (Chothia and Lesk J. Mol. Biol. 196:901-917 (1987)). The AbM hypervariable regions represent a compromise between the Kabat CDRs and Chothia structural loops and are used by Oxford Molecular's AbM antibody modeling software. The “contact” hypervariable regions are based on an analysis of the available complex crystal structures. The residues from each of these hypervariable regions are noted in the table below.

| Loop | Kabat | AbM | Chothia | Contact |
|---|---|---|---|---|
| L1 | L24-L34 | L24-L34 | L26-L32 | L30-L36 |
| L2 | L50-L56 | L50-L56 | L50-L52 | L46-L55 |
| L3 | L89-L97 | L89-L97 | L91-L96 | L89-L96 |
| H1 | H31-H35B¹ | H26-H35B¹ | H26-H32¹ | H30-H35B¹ |
| | H31-H35² | H26-H35² | H26-H32² | H30-H35² |
| H2 | H50-H65 | H50-H58 | H53-H55 | H47-H58 |
| H3 | H95-H102 | H95-H102 | H96-H101 | H93-H101 |

¹Kabat numbering
²Chothia numbering

[0107] Unless otherwise indicated, HVR residues and other residues in the variable domain (e.g., FR residues) are numbered herein according to Kabat et al., supra.

[0108] Hypervariable regions, as used herein, may include extended or alternative hypervariable regions as follows: 24-36 or 24-34 (L1), 46-56 or 50-56 (L2), and 89-97 or 89-96 (L3) in the V_{L} domain and 26-35, 30-35, 30-35A, 30-35B, or 31-35B (H1), 50-61, 50-65 or 49-65 (H2) and 93-102, 94-102, or 95-102 (H3) in the V_{H} domain. The variable domain residues are numbered according to Kabat et al., supra, for each of these definitions.

[0109] “Complementarity determining region,” or “CDR,” as used herein, refers to the regions within the HVRs of the variable domain which have the highest sequence variability and/or are involved in antigen recognition. Generally, native antibodies comprise four chains with six CDRs; three in the heavy chain variable domains, V_{H} (H1, H2, H3), and three in the light chain variable domains, V_{L} (L1, L2, L3). CDRs (CDR-L1, CDR-L2, CDR-L3, CDR-H1, CDR-H2, and CDR-H3) of exemplary anti-IL-36 antibodies of the present disclosure occur at amino acid residues 24-34 of L1, 50-56 of L2, 89-97 of L3, 30-35A of H1, 50-61 of H2, and 93-102 of H3. (Numbering according to Kabat et al., supra).

[0110] “Framework” or “FR” refers to variable domain residues other than hypervariable region (HVR) residues. The FR of a variable domain generally consists of four FR domains: FR1, FR2, FR3, and FR4. Accordingly, the HVR and FR sequences generally appear in the following sequence in V_{H} (or V_{L}): FR1-H1(L1)-FR2-H2(L2)-FR3-H3(L3)-FR4.

[0111] “Native antibody” refers to a naturally occurring immunoglobulin molecule. For example, native IgG antibodies are heterotetrameric glycoproteins of about 150,000 Daltons, composed of two identical light chains and two identical heavy chains that are disulfide-bonded. From N to C-terminus, each heavy chain has a variable region (V_{H}), also called a variable heavy domain or a heavy chain variable domain, followed by three constant domains (CH1, CH2, and CH3). Similarly, from N- to C-terminus, each light chain has a variable region (V_{L}), also called a variable light domain or a light chain variable domain, followed by a constant light (CL) domain. The light chain of an antibody may be assigned to one of two types, called kappa (κ) and lambda (λ), based on the amino acid sequence of its constant domain.

[0112] “Monoclonal antibody” as used herein refers to an antibody obtained from a substantially homogeneous population of antibodies, i.e., the individual antibodies comprising the population are identical and/or bind the same epitope, except for possible variant antibodies (e.g., variant antibodies contain mutations that occur naturally or arise during production of a monoclonal antibody, and generally are present in minor amounts). In contrast to polyclonal antibody preparations, which typically include different antibodies directed against different determinants (epitopes), each monoclonal antibody of a monoclonal antibody preparation is directed against a single determinant on an antigen. Thus, the term “monoclonal” indicates the character of the antibody as being obtained from a substantially homogeneous population of antibodies and is not to be construed as requiring production of the antibody by any particular method. For example, the monoclonal antibodies to be used may be made by a variety of techniques, including but not limited to the hybridoma method, recombinant DNA methods, phage-display methods, and methods utilizing transgenic animals containing all or part of the human immunoglobulin loci, such methods and other exemplary methods for making monoclonal antibodies being described herein.

[0113] “Chimeric antibody” refers to an antibody in which a portion of the heavy and/or light chain is derived from a particular source or species, while the remainder of the heavy and/or light chain is derived from a different source or species.

[0114] “Humanized antibody” refers to a chimeric antibody comprising amino acid sequences from non-human HVRs and amino acid sequences from human FRs. In certain embodiments, a humanized antibody will comprise substantially all of at least one, and typically two, variable domains, in which all or substantially all of the HVRs (e.g., CDRs) correspond to those of a non-human antibody, and all or substantially all of the FRs correspond to those of a human antibody. A humanized antibody optionally may comprise at least a portion of an antibody constant region derived from a human antibody. A “humanized form” of an antibody, e.g., a non-human antibody, refers to an antibody that has undergone humanization.

[0115] “Human antibody” refers to an antibody which possesses an amino acid sequence corresponding to that of an antibody produced by a human or a human cell or derived from a non-human source that utilizes human antibody repertoires or other human antibody-encoding sequences. This definition of a human antibody specifically excludes a humanized antibody comprising non-human antigen-binding residues.

[0116] “Human consensus framework” is a framework which represents the most commonly occurring amino acid residues in a selection of human immunoglobulin V_{L} or V_{H} framework sequences. Generally, the selection of human immunoglobulin V_{L} or V_{H} sequences is from a subgroup of variable domain sequences. Generally, the subgroup of sequences is a subgroup as in Kabat et al., Sequences of Proteins of Immunological Interest, Fifth Edition, NIH Publication 91-3242, Bethesda Md. (1991), vols. 1-3. In one embodiment, for the V_{L}, the subgroup is subgroup kappa I as in Kabat et al., supra. In one embodiment, for the V_{H}, the subgroup is subgroup III as in Kabat et al., supra.

[0117] “Acceptor human framework” as used herein is a framework comprising the amino acid sequence of a light chain variable domain (V_{L}) framework or a heavy chain variable domain (V_{H}) framework derived from a human immunoglobulin framework or a human consensus framework. An acceptor human framework “derived from” a human immunoglobulin framework or a human consensus framework may comprise the same amino acid sequence thereof, or it may contain amino acid sequence changes. In some embodiments, the number of amino acid changes are 10 or less, 9 or less, 8 or less, 7 or less, 6 or less, 5 or less, 4 or less, 3 or less, or 2 or less. In some embodiments, the V_{L} acceptor human framework is identical in sequence to the V_{L} human immunoglobulin framework sequence or human consensus framework sequence.

[0118] “Fc region,” refers to a dimer complex comprising the C-terminal polypeptide sequences of an immunoglobulin heavy chain, wherein a C-terminal polypeptide sequence is that which is obtainable by papain digestion of an intact antibody. The Fc region may comprise native or variant Fc sequences. Although the boundaries of the Fc sequence of an immunoglobulin heavy chain may vary, the human IgG heavy chain Fc sequence is usually defined to stretch from an amino acid residue at about position Cys226, or from about position Pro230, to the carboxyl-terminus of the Fc sequence. However, the C-terminal lysine (Lys447) of the Fc sequence may or may not be present. The Fc sequence of an immunoglobulin generally comprises two constant domains, a CH2 domain and a CH3 domain, and optionally comprises a CH4 domain.

[0119] “Fc receptor” or “FcR,” refers to a receptor that binds to the Fc region of an antibody. In some embodiments, an FcR is a native human FcR. In some embodiments, an FcR is one which binds an IgG antibody (a gamma receptor) and includes receptors of the FcγRI, FcγRII, and FcγRIII subclasses, including allelic variants and alternatively spliced forms of those receptors. FcγRII receptors include FcγRIIA (an “activating receptor”) and FcγRIIB (an “inhibiting receptor”), which have similar amino acid sequences that differ primarily in the cytoplasmic domains thereof. Activating receptor FcγRIIA contains an immunoreceptor tyrosine-based activation motif (ITAM) in its cytoplasmic domain. Inhibiting receptor FcγRIIB contains an immunoreceptor tyrosine-based inhibition motif (ITIM) in its cytoplasmic domain, (see, e.g., Daeron, Annu. Rev. Immunol. 15:203-234 (1997)). FcR, as used herein, also includes the neonatal receptor, FcRn, which is responsible for the transfer of maternal IgGs to the fetus (Guyer et al, J. Immunol. 1 17:587 (1976) and Kim et al, J. Immunol. 24:249 (1994)) and regulation of homeostasis of immunoglobulins. FcRs are reviewed, for example, in Ravetch and Kinet, Annu. Rev. Immunol 9:457-92 (1991); Capel et al, Immunomethods 4:25-34 (1994); and de Haas et al, J. Lab. Clin. Med. 126:330-41 (1995).

[0120] “Multivalent antibody,” as used herein, is an antibody comprising three or more antigen binding sites. The multivalent antibody is preferably engineered to have the three or more antigen binding sites and is generally not a native sequence IgM or IgA antibody.

[0121] “Multispecific antibody” is an antibody having at least two different binding sites, each site with a different binding specificity. A multispecific antibody can be a full-length antibody or an antibody fragment, and the different binding sites may bind each to a different antigen or the different binding sites may bind to two different epitopes of the same antigen.

[0122] “Fv fragment” refers to an antibody fragment which contains a complete antigen recognition and binding site. This region consists of a dimer of one heavy and one light chain variable domain in tight association, which can be covalent in nature, for example in scFv. It is in this configuration that the three HVRs of each variable domain interact to define an antigen binding site on the surface of the V_{H}-V_{L} dimer. Collectively, the six HVRs or a subset thereof confer antigen binding specificity to the antibody. However, even a single variable domain (or half of an Fv comprising only three HVRs specific for an antigen) has the ability to recognize and bind antigen, although usually at a lower affinity than the entire binding site.

[0123] “Fab fragment” refers to an antibody fragment that contains a variable and constant domain of the light chain and a variable domain and the first constant domain (CH1) of the heavy chain. “F(ab′)₂ fragments” comprise a pair of Fab fragments which are generally covalently linked near their carboxy termini by hinge cysteines between them. Other chemical couplings of antibody fragments also are known in the art.

[0124] “Antigen binding arm,” as used herein, refers to a component of an antibody that has an ability to specifically bind a target molecule of interest. Typically, the antigen binding arm is a complex of immunoglobulin polypeptide sequences, e.g., HVR and/or variable domain sequences of an immunoglobulin light and heavy chain.

[0125] “Single-chain Fv” or “scFv” refer to antibody fragments comprising the V_{H} and V_{L} domains of an antibody, wherein these domains are present in a single polypeptide chain. Generally, an Fv polypeptide further comprises a polypeptide linker between the V_{H} and V_{L} domains which enables the scFv to form the desired antigen binding structure.

[0126] “Diabodies” refers to small antibody fragments with two antigen-binding sites, which fragments comprise a heavy chain variable domain (V_{H}) connected to a light chain variable domain (V_{L}) in the same polypeptide chain (V_{H} and V_{L}). By using a linker that is too short to allow pairing between the two domains on the same chain, the domains are forced to pair with the complementary domains of another chain and create two antigen-binding sites.

[0127] “Linear antibodies” refers to the antibodies described in Zapata et al., Protein Eng., 8(10): 1057-1062 (1995). Briefly, these antibodies comprise a pair of tandem Fd regions (VH-CH1-VH-CH1) which, together with complementary light chain polypeptides, form a pair of antigen binding regions. Linear antibodies can be multispecific, such as e.g., trispecific or bispecific, or monospecific.

[0128] “Naked antibody” refers to an antibody that is not conjugated to a heterologous moiety (e.g., a cytotoxic moiety) or radiolabel.

[0129] “Affinity” refers to the strength of the total of noncovalent interactions between a single binding site of a molecule (e.g., an antibody) and its binding partner (e.g., an antigen). “Binding affinity” refers to intrinsic binding affinity which reflects a 1:1 interaction between members of a binding pair (e.g., antibody and antigen). The affinity of a molecule X for its partner Y can generally be represented by the equilibrium dissociation constant (K_{D}). Affinity can be measured by common methods known in the art, including those described herein. Specific illustrative and exemplary embodiments for measuring binding affinity are described in the following.

[0130] “Binds specifically” or “specific binding” refers to binding of an antibody to an antigen with an affinity value of no more than about 1×10⁻⁷ M.

[0131] “Affinity matured” antibody refers to an antibody with one or more alterations in one or more HVRs, compared to a parent antibody which does not possess such alterations, such alterations resulting in an improvement in the affinity of the antibody for antigen.

[0132] “Functional antigen binding site” of an antibody is one which is capable of binding a target antigen. The antigen binding affinity of the antigen binding site is not necessarily as strong as the parent antibody from which the antigen binding site is derived, but the ability to bind antigen must be measurable using any one of a variety of methods known for evaluating antibody binding to an antigen.

[0133] “Isolated antibody” refers to an antibody which has been separated from a component of its natural environment. In some embodiments, an antibody is purified to greater than 95% or 99% purity as determined by, for example, electrophoretic (e.g., SDS-PAGE, isoelectric focusing (IEF), capillary electrophoresis) or chromatographic methods (e.g., ion exchange or reverse phase HPLC). For review of methods for assessment of antibody purity, see, e.g., Flatman et al., J. Chromatogr. B 848:79-87.

[0134] “Substantially similar” or “substantially the same,” as used herein, refers to a sufficiently high degree of similarity between two numeric values (for example, one associated with a test antibody and the other associated with a reference antibody), such that one of skill in the art would consider the difference between the two values to be of little or no biological and/or statistical significance within the context of the biological characteristic measured by said values (e.g., K_{D} values).

[0135] “Substantially different,” as used herein, refers to a sufficiently high degree of difference between two numeric values (generally one associated with a molecule and the other associated with a reference molecule) such that one of skill in the art would consider the difference between the two values to be of statistical significance within the context of the biological characteristic measured by said values (e.g., K_{D} values).

[0136] “Effector functions” refer to those biological activities attributable to the Fc region of an antibody, which vary with the antibody isotype. Examples of antibody effector functions include: Clq binding and complement dependent cytotoxicity (CDC); Fc receptor binding; antibody-dependent cell-mediated cytotoxicity (ADCC); phagocytosis; down regulation of cell surface receptors (e.g., B cell receptor); and B cell activation.

[0137] “Immunoconjugate” refers to an antibody conjugated to one or more heterologous molecule(s), including but not limited to a cytotoxic agent.

[0138] “Treatment,” “treat” or “treating” refers to clinical intervention in an attempt to alter the natural course of a disorder in the individual being treated and can be performed either for prophylaxis or during the course of clinical pathology. Desired results of treatment can include, but are not limited to, preventing occurrence or recurrence of the disorder, alleviation of symptoms, diminishment of any direct or indirect pathological consequences of the disorder, preventing metastasis, decreasing the rate of progression, amelioration or palliation of a disease state, and remission or improved prognosis. For example, treatment can include administration of a therapeutically effective amount of pharmaceutical formulation comprising an anti-IL-36 antibody to a subject to delay development or slow progression of a disease or condition mediated by IL-36 or disease or condition in which IL-36, or a downstream pathways stimulated by an IL-36 cytokine, may play a role in the pathogenesis and/or progression.

[0139] “Pharmaceutical formulation” refers to a preparation in a form that allows the biological activity of the active ingredient(s) to be effective, and which contain no additional components which are toxic to the subjects to which the formulation is administered. A pharmaceutical formulation may include one or more active agents. For example, a pharmaceutical formulation may include an anti-IL-36 antibody as the sole active agent of the formulation or may include an anti-IL-36 antibody and one or more additional active agents.

[0140] By “sole active agent”, as used herein, is meant that the agent referred to is the only agent present in the formulation, or used in the therapy, that provides, or would be expected to provide, the relevant pharmacological effect to treat the subject for the condition, consistent with the description of “treatment” as provided herein. A pharmaceutical formulation comprising a sole active agent does not exclude the presence of one or more non-active agents, such as e.g., a pharmaceutically acceptable carrier, in the formulation. A “non-active agent” is an agent that would not be expected to provide, or otherwise significantly contribute to, the relevant pharmacological effect intended to treat the subject for the condition.

[0141] “Pharmaceutically acceptable carrier” refers to an ingredient in a pharmaceutical formulation, other than an active ingredient, which is nontoxic to the subject to whom it is administered. A pharmaceutically acceptable carrier includes, but is not limited to, a buffer, excipient, stabilizer, or preservative.

[0142] “Therapeutically effective amount” refers to the amount of an active ingredient or agent (e.g., a pharmaceutical formulation) to achieve a desired therapeutic or prophylactic result, e.g., to treat or prevent a disease, disorder, or condition in a subject. In the case of an IL-36 mediated disease or condition, the therapeutically effective amount of the therapeutic agent is an amount that reduces, prevents, inhibits, and/or relieves to some extent one or more of the symptoms associated with the disease, disorder, or condition. For treatment of inflammatory conditions, such as skin inflammatory conditions (e.g., eczema, psoriasis, rosacea, seborrheic dermatitis), efficacy in vivo can, for example, be measured by assessing the duration, severity, and/or recurrence of symptoms, the response rate (RR), duration of response, and/or quality of life.

[0143] “Concurrently,” as used herein, refers to administration of two or more therapeutic agents, where at least part of the administration overlaps in time. Accordingly, concurrent administration includes a dosing regimen when the administration of one or more agent(s) continues after discontinuing the administration of one or more other agent(s).

[0144] “Individual” or “subject” refers to a mammal, including but not limited to, domesticated animals (e.g., cows, sheep, cats, dogs, and horses), primates (e.g., humans and non-human primates such as monkeys), rabbits, and rodents (e.g., mice and rats).

### Detailed Description of Various Embodiments

[0145] I. IL-36 Cytokines

[0146] Each of the agonist cytokines IL-36α, IL-36β, and IL-36γ induces intracellular signaling by binding to the cognate receptor, IL-36R (or IL1RL2). Binding by any of these IL-36 cytokines to the IL-36R receptor causes recruitment and engagement of co-receptor IL1RAP, resulting in the formation of a ternary signaling complex comprising IL-36R, IL1RAP, and the respective IL-36 cytokine that initiated the signaling event. Signal transduction stimulated by IL-36α, IL-36β, or IL-36γ leads to activation of the NK-κB transcription factor and AP-1 pathways in target cells and induces various inflammatory, proliferative, and pathogenic immune responses. See, e.g., Jennifer Towne et al., J. Biol. Chem. 279(14):13677-13688 (2004); Sebastian Gunther et al., J. Immunol. 193(2):921-930 (2014).

[0147] The IL-36 cytokines, IL-36α, IL-36β, and IL-36γ, are relatively short proteins that bind to and act as agonists of the receptor IL-36R. In vivo, the IL-36 cytokines undergo proteolytic processing that results in N-terminal truncation. This truncation is necessary for IL-36α, IL-36β, and IL-36γ to achieve their full agonist activity with IL-36R. Similarly, the IL-36R antagonist, IL-36Ra requires N-terminal truncation in order to achieve it full antagonist activity. The amino acid and nucleotide sequences and annotation of human versions of IL-36α, IL-36β, IL-36γ (also referred to herein as “hu-IL-36α,” “hu-IL-36β,” and “hu-IL-36γ”) and IL-36Ra are publicly available. See e.g, full amino acid sequences at UniProt entry numbers Q9UHA7, Q9NZH7-2, Q9NZH8, and Q9UBH0, respectively. Similarly, amino acid and nucleotide sequences of the versions of the three IL-36 cytokines from cynomolgus monkey, referred to herein as “cy-IL-36a,” “cy-IL-36β,” and “cy-IL-36γ,” also are publicly available at UniProt entry numbers A0A2K5UTG0, A0A2K5UV63-1, and A0A2K5VYV6.

[0148] Polypeptide constructs corresponding to portions of the hu-IL-36 and cy-IL-36 cytokine proteins can be used as antigens to elicit anti-IL-36 antibodies with binding affinity for the human and/or cynomolgus monkey versions of the specific IL-36 cytokines, IL-36α, IL-36β, and IL-36γ. As disclosed elsewhere herein, these anti-IL-36 antibodies are capable of partially or fully-blocking the binding of one or more of the specific cytokines IL-36α, IL-36β, and IL-36γ to its cognate receptor, and thereby decreasing intracellular signals initiated by this binding. Antibodies produced by immunization with IL-36 antigens may be modified, e.g., as described herein, to modulate (enhance or reduce) certain properties of the antibodies, including but not limited to e.g., enhancing affinity for the IL-36 antigen, enhancing affinity for another IL-36 antigen, enhancing cross-reactivity, reducing cross-reactivity, etc.

[0149] Table 1 below provides a summary description of the sequences of the human and cynomolgus monkey IL-36 polypeptide constructs used to generate anti-IL-36 antibodies of the present disclosure and their sequence identifiers. The UniProt database entry identifiers of the proteins are also included as well as the domain boundaries of the construct sequence relative to the full-length proteins. The sequences of each of the IL-36α, IL-36β, IL-36γ, or IL-36Ra polypeptide constructs correspond to the N-terminal truncated version having the highest agonist activity, or in the case of IL-36Ra, antagonist activity. For example, the N-terminal truncated IL-36α, IL-36β, and IL-36γ amino acid sequences provided in Table 1 begin at N-terminal positions K6, R5, and S18, respectively. Additionally, the purification tag sequences used to make easily purifiable versions of the IL-36 proteins as described elsewhere herein. The sequences also are included in the accompanying Sequence Listing.

TABLE 1
IL-36 sequences and purification tags

| | | | SEQ |
|---|---|---|---|
| | Domain | | ID |
| Description | boundary | Sequence | NO: |
| hu-IL-36α | K6-F158 | KIDTPQQGSIQDINHRVWVLQDQTLIAVPRKDRMSPVTIALISCR | 1 |
| (UniProt | | HVETLEKDRGNPIYLGLNGLNLCLMCAKVGDQPTLQLKEKDIMDL | |
| Q9UHA7) | | YNQPEPVKSFLFYHSQSGRNSTFESVAFPGWFIAVSSEGGCPLIL | |
| | | TQELGKANTTDFGLTMLF | |
| hu-IL-36β | R5-E157 | REAAPKEYAIRDSRQMVWVLSGNSLIAAPLSRSIKPVTLHLIACR | 2 |
| (UniProt | | DTEFSDKEKGNMVYLGIKGKDLCLFCAEIQGKPTLQLKEKNIMDL | |
| Q9NZH7-2) | | YVEKKAQKPFLFFHNKEGSTSVFQSVSYPGWFIATSTTSGQPIFL | |
| | | TKERGITNNTNFYLDSVE | |
| hu-IL-36γ | S18-D169 | SMCKPITGTINDLNQQVWTLQGQNLVAVPRSDSVTPVTVAVITCK | 3 |
| (UniProt | | YPEALEQGRGDPIYLGIQNPEMCLYCEKVGEQPTLQLKEQKIMDL | |
| Q9NZH8) | | YGQPEPVKPFLFYRAKTGRTSTLESVAFPDWFIASSKRDQPIILT | |
| | | SELGKSYNTAFELNIND | |
| hu-IL-36Ra | V2-D155 | VLSGALCFRMKDSALKVLYLHNNQLLAGGLHAGKVIKGEEISVVP | 4 |
| (UniProt | | NRWLDASLSPVILGVQGGSQCLSCGVGQEPTLTLEPVNIMELYLG | |
| Q9UBH0) | | AKESKSFTFYRRDMGLTSSFESAAYPGWFLCTVPEADQPVRLTQL | |
| | | PENGGWNAPITDFYFQQCD | |
| cy-IL-36α | K6-F158 | KSEMPQPVSIQDINHRVWVLQDQILIAVPRKDRVSPVTISLISCR | 5 |
| (UniProt | | HVETLEKDRGNPIYLGLNGLNLCLMCAKAGDQPTLQLKEKDIMDL | |
| A0A2K5UTG0) | | YNQPEPVKSFLFYHSQSGRNSTFESVAFPGWFIAVSSEGGCPLIL | |
| | | TQELGKANTTDFGLTMLF | |
| cy-IL-36β | W5-E157 | WQAAPKEYAIRDSRQMVWVLSGNSLIAAPLSNRVKPVTLHLITCR | 6 |
| (UniProt | | DTEFSDKKKGNLVYLGIRGKDLCLFCEEIQGKPTLQLKEKNIMDL | |
| A0A2K5UV63-1) | | YMEKKAQKPFLFFHNKEGSSSVFQSVSYPGWFIATSSTSGQPIFL | |
| | | TQERGITNNTNFYLDSVE | |
| cy-IL-36γ | S18-K168 | SMRTPITGTINDLNQQVWTLQGQILVAVPRSDSVTPVTVAVITCK | 7 |
| (UniProt | | YPEALDQSRGDPIYLGIRNPEMCLCCEEVGGQPTLQLKEQKIMDL | |
| A0A2K5VYV6) | | YGQPEPVKPFLFYRVKTGRTSTLESVAFPNWFIASSTRDQPIILT | |
| | | SELGKSYNTAFELNIK | |
| 12xHis-SUMO | n/a | MHHHHHHHHHHHHMSDSEVNQEAKPEVKPEVKPETHINLKVSDGS | 8 |
| | | SEIFFKIKKTTPLRRLMEAFAKRQGKEMDSLRFLYDGIRIQADQT | |
| | | PEDLDMEDNDIIEAHREQIGG | |
| 12xHis-TEV | n/a | MHHHHHHHHHHHHENLYFQS | 9 |
| GS-AviTag | n/a | GGGGSGLNDIFEAQKIEWHE | 10 |
| signal sequence | n/a | MGWSCIILFLVATATGVHS | 11 |
| (mouse Ig heavy | | | |
| chain V region | | | |
| 102) | | | |
| GS-TEV-GS- | n/a | SGGGGSENLYFQGGGGSEPKSCDKTHTCPPCPAPELLGGPSVFLF | 12 |
| hulgG1Fc-FLAG | | PPKPKDTLMISRTPEVTCVVVDVSHEDPEVKFNWYVDGVEVHNAK | |
| | | TKPREEQYNSTYRVVSVLTVLHQDWLNGKEYKCKVSNKALPAPIE | |
| | | KTISKAKGQPREPQVYTLPPSRDELTKNQVSLTCLVKGFYPSDIA | |
| | | VEWESNGQPENNYKTTPPVLDSDGSFFLYSKLTVDKSRWQQGNVF | |
| | | SCSVMHEALHNHYTQKSLSLSPGKDYKDDDDK | |

[0150] II. Anti-IL-36 Antibodies

[0151] In some embodiments, the present disclosure provides structures of anti-IL-36 antibodies in terms of the amino acid and encoding nucleotide sequences of the various well-known immunoglobulin features (e.g., CDRs, HVRs, FRs, V_{H}, and V_{L} domains). Table 2 below provides a summary description of exemplary anti-IL-36 antibody sequences of the present disclosure, and their sequence identifiers. These sequences and others are included in the accompanying Sequence Listing.

TABLE 2
Anti-IL-36 antibody sequences

| | | SEQ |
|---|---|---|
| | | ID |
| Description | Sequence | NO: |
| mAb1.0-VL | QSVLTQPPSVSGAPGQRVTISCTGSSSNIGAHYDVHWYQQLPGTAPKLLIY | 13 |
| | SNNNRPSGVPDRFSGSKSGTSASLAITGLQAEDEADYYCQSYDYSLRGYVF | |
| | GGGTKLTVL | |
| MAb1.0-HVR-L1 | TGSSSNIGAHYDVH | 14 |
| mAb1.0-HVR-L2 | SNNNRPS | 15 |
| mAb1.0-HVR-L3 | QSYDYSLRGYV | 16 |
| mAb2.0-VL and | QSVLTQPPSVSGAPGQRVTISCTGSSSNIGAHYDVHWYQQLPGTAPKLLIY | 17 |
| mAb6.0_2.0-VL | GNDNRPSGVPDRFSGSKSGTSASLAITGLQAEDEADYYCQSYDYSLSGYVF | |
| | GGGTKLTVL | |
| MAb2, MAb6_2, | ESVLTQPPSVSGAPGQRVTISCTGSSSNIGAHYDVHWYQQLPGTAPKLLIY | 77 |
| mAb6_2.7, and | GNDNRPSGVPDRFSGSKSGTSASLAITGLQAEDEADYYCQSYDYSLSGYVF | |
| mAb2.10-VL | GGGTKLTVL | |
| MAb2.0, MAb2, | TGSSSNIGAHYDVH | 18 |
| mAb6_2, | | |
| mAb6_2.7, and | | |
| mAb2.10-HVR- | | |
| L1 | | |
| mAb2.0, mAb2, | GNDNRPS | 19 |
| mAb6_2, | | |
| mAb6_2.7, and | | |
| mAb2.10-HVR- | | |
| L2 | | |
| mAb2.0, mAb2, | QSYDYSLSGYV | 20 |
| mAb6_2, | | |
| mAb6_2.7, and | | |
| mAb2.10-HVR- | | |
| L3 | | |
| mAb3.0-VL | QSVLTQPPSVSGAPGQRVTISCTGSSSNIGAGYDVHWYQQLPGTAPKLLIY | 21 |
| | GNTNRPSGVPDRFSGSKSGTSASLAITGLQAEDEADYYCQSYDYSLRGYVF | |
| | GGGTKLTVL | |
| mAb3.0-HVR-L1 | TGSSSNIGAGYDVH | 22 |
| mAb3.0-HVR-L2 | GNTNRPS | 23 |
| mAb3.0-HVR-L3 | QSYDYSLRGYV | 24 |
| mAb4.0-VL | QSVLTQPPSVSGAPGQRVTISCTGSSSNIGAGYDVHWYQQLPGTAPKLLIY | 25 |
| | GNRNRPSGVPDRFSGSKSGTSASLAITGLQAEDEADYYCQSYDYSLRVYVF | |
| | GGGTKLTVL | |
| mAb4.0-HVR-L1 | TGSSSNIGAGYDVH | 26 |
| mAb4.0-HVR-L2 | GNRNRPS | 27 |
| mAb4.0-HVR-L3 | QSYDYSLRVYV | 28 |
| mAb5.0-VL | QSVLTQPPSVSGAPGQRVTISCTGSSSNIGAHYDVHWYQQLPGTAPKLLIY | 29 |
| | GNDNRPSGVPDRFSGSKSGTSASLAITGLQAEDEADYYCQSYDYSLKAYVF | |
| | GGGTKLTVL | |
| mAb5.0-HVR-L1 | TGSSSNIGAGYDVH | 30 |
| mAb5.0-HVR-L2 | GNDNRPS | 31 |
| mAb5.0-HVR-L3 | QSYDYSLKAYV | 32 |
| mAb6.0-VL | QSVLTQPPSVSGAPGQRVTISCTGSSSNIGAGYDVHWYQQLPGTAPKLLIY | 33 |
| | GNTNRPSGVPDRFSGSKSGTSASLAITGLQAEDEADYYCQSYDISLSGWVF | |
| | GGGTKLTVL | |
| mAb6-VL | ESVLTQPPSVSGAPGQRVTISCTGSSSNIGAGYDVHWYQQLPGTAPKLLIY | 78 |
| | GNTNRPSGVPDRFSGSKSGTSASLAITGLQAEDEADYYCQSYDISLSGWVF | |
| | GGGTKLTVL | |
| mAb6.0 and | TGSSSNIGAGYDVH | 34 |
| mAb6- | | |
| HVR-L1 | | |
| mAb6.0 and | GNTNRPS | 35 |
| mAb6- | | |
| HVR-L2 | | |
| mAb6.0 and | QSYDISLSGWV | 36 |
| mAb6- | | |
| HVR-L3 | | |
| mAb7.0-VL | EIVLTQSPGTLSLSPGERATLSCRASQSVSSNYLAWYQQKPGQAPKLLIYS | 37 |
| | ASSLQSGVPSRFSGSGSGTDFTLTISSLQPEDFATYYCQQTYSYPPTFGQG | |
| | TKVEIK | |
| mAb7.0-HVR-L1 | RASQSVSSNYLA | 38 |
| mAb7.0-HVR-L2 | SASSLQS | 39 |
| mAb7.0-HVR-L3 | QQTYSYPPT | 40 |
| mAb8.0-VL | DIQMTQSPSSLSASVGDRVTITCRASQTIYKYLNWYQQKPGKAPKLLIYAA | 41 |
| | SSLQSGVPSRFSGSGSGTDFTLTISSLQPEDFATYYCQQYSSIPYTFGQGT | |
| | KVEIK | |
| mAb8.0-HVR-L1 | RASQTIYKYLN | 42 |
| mAb8.0-HVR-L2 | AASSLQS | 43 |
| mAb8.0-HVR-L3 | QQYSSIPYT | 44 |
| mAb1.0-VH | QVQLVESGGGVVQPGRSLRLSCAASGFSFSAYAMHWVRQAPGKGLEWVAVI | 45 |
| | SYDGTNEYYADSVKGRFTISRDNSKNTLYLQMNSLRAEDTAVYYCARGIRI | |
| | FTSYFDSWGQGTLVTVSS | |
| mAb1.0-HVR-H1 | SAYAMHW | 46 |
| mAb1.0-HVR-H2 | VISYDGTNEYYAD | 47 |
| mAb1.0-HVR-H3 | ARGIRIFTSYFDS | 48 |
| mAb2.0-VH | QLQLQESGPGLVKPSETLSLTCTVSGGSISTSSYYWGWIRQPPGKGLEWIG | 49 |
| | SIYYTGNTYYNPSLKSRVTISVDTSKNQFSLKLSSVTAADTAVYYCARVRY | |
| | GVGVPRYFDPWGQGTLVTVSS | |
| mAb2-VH | ELQLQESGPGLVKPSETLSLTCTVSGGSISTSSYYWGWIRQPPGKGLEWIG | 79 |
| | SIYYTGNTYYNPSLKSRVTISVDTSKNQFSLKLSSVTAADTAVYYCARVRY | |
| | GVGVPRYFDPWGQGTLVTVSS | |
| mAb2.0 and | STSSYYW | 50 |
| mAb2-HVR-H1 | | |
| mAb2.0 and | SIYYTGNTYYNP | 51 |
| mAb2-HVR-H2 | | |
| mAb2.0 and | ARVRYGVGVPRYFDP | 52 |
| mAb2-HVR-H3 | | |
| mAb3.0-VH | QLQLQESGPGLVKPSETLSLTCTVSGGSISSTSYYWGWIRQPPGKGLEWIG | 53 |
| | SIHYSGNTYYNPSLKSRVTISVDTSKNQFSLKLSSVTAADTAVYYCARVHY | |
| | GGYIPRRFDHWGQGTLVTVSS | |
| mAb3.0-HVR-H1 | SSTSYYW | 54 |
| mAb3.0-HVR-H2 | SIHYSGNTYYNP | 55 |
| mAb3.0-HVR-H3 | ARVHYGGYIPRRFDH | 56 |
| mAb4.0-VH | QLQLQESGPGLVKPSETLSLTCTVSGGSIGSRSYYWGWIRQPPGKGLEWIG | 57 |
| | SIHYSGTTYYNPSLKSRVTISVDTSKNQFSLKLSSVTAADTAVYYCARVAP | |
| | SYPRVFDYWGQGTLVTVSS | |
| mAb4.0-HVR-H1 | GSRSYYW | 58 |
| mAb4.0-HVR-H2 | SIHYSGTTYYNP | 59 |
| mAb4.0-HVR-H3 | ARVAPSYPRVFDY | 60 |
| mAb5.0-VH | EVQLLESGGGLVQPGGSLRLSCAASGFTFSTYAMSWVRQAPGKGLEWVSGI | 61 |
| | SGGSGYTYYADSVKGRFTISRDNSKNTLYLQMNSLRAEDTAVYYCARVVTY | |
| | RDPPASFDYWGQGTLVTVSS | |
| mAb5.0-HVR-H1 | STYAMS | 62 |
| mAb5.0-HVR-H2 | GISGGSGYTYYAD | 63 |
| mAb5.0-HVR-H3 | ARVVTYRDPPASFDY | 64 |
| mAb6.0 and | QLQLQESGPGLVKPSETLSLTCTVSGGSITSSNYYWGWIRQPPGKGLEWIG | 65 |
| mAb6.0_2.0-VH | SIDYTGSTYYNPSLKSRVTISVDTSKNQFSLKLSSVTAADTAVYYCARGKY | |
| | YETYLGFDVWGQGTLVTVSS | |
| mAb6 and | ELQLQESGPGLVKPSETLSLTCTVSGGSITSSNYYWGWIRQPPGKGLEWIG | 80 |
| mAb6_2-VH | SIDYTGSTYYNPSLKSRVTISVDTSKNQFSLKLSSVTAADTAVYYCARGKY | |
| | YETYLGFDVWGQGTLVTVSS | |
| mAb6.0 and | TSSNYYW | 66 |
| mAb6 and | | |
| mAb6.0_2.0 and | | |
| mAb6_2-HVR-H1 | | |
| mAb6.0 and | SIDYTGSTYYNP | 67 |
| mAb6 and | | |
| mAb6.0_2.0 and | | |
| mAb6_2-HVR-H2 | | |
| mAb6.0 and | ARGKYYETYLGFDV | 68 |
| mAb6 and | | |
| mAb6.0_2.0 and | | |
| mAb6_2-HVR-H3 | | |
| mAb7.0-VH | QVQLVESGGGVVQPGRSLRLSCAASGFTFSSYGMHWVRQAPGKGLEWVAVI | 69 |
| | SYGGSERYYADSVKGRFTISRDNSKNTLYLQMNSLRAEDTAVYYCAREPWY | |
| | SSRGWTGYGFDVWGQGTLVTVSS | |
| mAb7.0-HVR-H1 | SSYGMH | 70 |
| mAb7.0-HVR-H2 | VISYGGSERYYAD | 71 |
| mAb7.0-HVR-H3 | AREPWYSSRGWTGYGFDV | 72 |
| mAb8.0-VH | QVQLVQSGAEVKKPGSSVKVSCKASGGTFSNYAISWVRQAPGQGLEWMGGI | 73 |
| | LPILGTVDYAQKFQGRVTITADESTSTAYMELSSLRSEDTAVYYCAREPWY | |
| | RLGAFDVWGQGTLVTVSS | |
| mAb8.0-HVR-H1 | SNYAIS | 74 |
| mAb8.0-HVR-H2 | GILPILGTVDYAQ | 75 |
| mAb8.0-HVR-H3 | AREPWYRLGAFDV | 76 |
| mAb6_2.1-VH | ELQLQESGPGLVKPSETLSLTCTVSGGSITSTNYYWGWIRQPPGKGLEWIG | 81 |
| | NIDYTGSTYYNASLKSRVTISVDTSKNQFSLKLSSVTAADTAVYYCATGKY | |
| | YETYLGFDVWGQGTLVTVSS | |
| mAb6_2.1-HVR- | TSTNYYW | 82 |
| H1 | | |
| mAb6_2.1-HVR- | NIDYTGSTYYNA | 83 |
| H2 | | |
| mAb6_2.1-HVR- | ATGKYYETYLGFDV | 84 |
| H3 | | |
| mAb6_2.2-VH | ELQLQESGPGLVKPSETLSLTCTVSGGSITSSNAYWGWIRQPPGKGLEWIG | 85 |
| | SIDYTGSTAYNPSLKSRVTISVDTSKNQFSLKLSSVTAADTAVYYCAHGKY | |
| | YETYLGFDVWGQGTLVTVSS | |
| mAb6_2.2-HVR- | TSSNAYW | 86 |
| H1 | | |
| mAb6_2.2-HVR- | SIDYTGSTAYNP | 87 |
| H2 | | |
| mAb6_2.2-HVR- | AHGKYYETYLGFDV | 88 |
| H3 | | |
| mAb6_2.3-VH | ELQLQESGPGLVKPSETLSLTCTVSGGSITASNYYWGWIRQPPGKGLEWIG | 89 |
| | SIDYTGSTYYNTSLKSRVTISVDTSKNQFSLKLSSVTAADTAVYYCATGKY | |
| | YETYLGFDVWGQGTLVTVSS | |
| mAb6_2.3-HVR- | TASNYYW | 90 |
| H1 | | |
| mAb6_2.3-HVR- | SIDYTGSTYYNT | 91 |
| H2 | | |
| mAb6_2.3-HVR- | ATGKYYETYLGFDV | 92 |
| H3 | | |
| mAb6_2.4-VH | ELQLQESGPGLVKPSETLSLTCTVSGGSITASNYYWGWIRQPPGKGLEWIG | 93 |
| | SIDYTGSTYYNPSLKSRVTISVDTSKNQFSLKLSSVTAADTAVYYCATGKY | |
| | YETYLGFDVWGQGTLVTVSS | |
| mAb6_2.4-HVR- | TASNYYW | 94 |
| H1 | | |
| mAb6_2.4-HVR- | SIDYTGSTYYNP | 95 |
| H2 | | |
| mAb6_2.4-HVR- | ATGKYYETYLGFDV | 96 |
| H3 | | |
| mAb6_2.5-VH | ELQLQESGPGLVKPSETLSLTCTVSGGSITASNYYWGWIRQPPGKGLEWIG | 97 |
| | SIDYTGSTYYEPSLKSRVTISVDTSKNQFSLKLSSVTAADTAVYYCATGSY | |
| | YETYLGFDVWGQGTLVTVSS | |
| mAb6_2.5-HVR- | TASNYYW | 98 |
| H1 | | |
| mAb6_2.5-HVR- | SIDYTGSTYYEP | 99 |
| H2 | | |
| mAb6_2.5-HVR- | ATGSYYETYLGFDV | 100 |
| H3 | | |
| mAb6_2.6-VH | ELQLQESGPGLVKPSETLSLTCTVSGGSITASNYYWGWIRQPPGKGLEWIG | 101 |
| | SIDYTGSTYYEPSLKSRVTISVDTSKNQFSLKLSSVTAADTAVYYCATGNY | |
| | YETYLGFDVWGQGTLVTVSS | |
| mAb6_2.6-HVR- | TASNYYW | 102 |
| H1 | | |
| mAb6_2.6-HVR- | SIDYTGSTYYEP | 103 |
| H2 | | |
| mAb6_2.6-HVR- | ATGNYYETYLGFDV | 104 |
| H3 | | |
| mAb6_2.7-VH | ELQLQESGPGLVKPSETLSLTCTVSGGSITASNTYWGWIRQPPGKGLEWIG | 105 |
| | SIDYTGSTYYNPSLKSRVTISVDTSKNQFSLKLSSVTAADTAVYYCATGKY | |
| | YETYLGFDVWGQGTLVTVSS | |
| mAb6_2.7-HVR- | TASNTYW | 106 |
| H1 | | |
| mAb6_2.7-HVR- | SIDYTGSTYYNP | 107 |
| H2 | | |
| mAb6_2.7-HVR- | ATGKYYETYLGFDV | 108 |
| H3 | | |
| mAb6_2.8-VH | ELQLQESGPGLVKPSETLSLTCTVSGGSITASNYYWGWIRQPPGKGLEWIG | 109 |
| | SIDYTGSTYYNPSLKSRVTISVDTSKNQFSLKLSSVTAADTAVYYCASGKY | |
| | YETYLGFDVWGQGTLVTVSS | |
| mAb6_2.8-HVR- | TASNYYW | 110 |
| H1 | | |
| mAb6_2.8-HVR- | SIDYTGSTYYNP | 111 |
| H2 | | |
| mAb6_2.8-HVR- | ASGKYYETYLGFDV | 112 |
| H3 | | |
| mAb6_2.9-VH | ELQLQESGPGLVKPSETLSLTCTVSGGSITSSNYYWGWIRQPPGKGLEWIG | 113 |
| | SIDYTGSTYYNPSLKSRVTISVDTSKNQFSLKLSSVTAADTAVYYCATGKY | |
| | YETYLGFDVWGQGTLVTVSS | |
| mAb6_2.9-HVR- | TSSNYYW | 114 |
| H1 | | |
| mAb6_2.9-HVR- | SIDYTGSTYYNP | 115 |
| H2 | | |
| mAb6_2.9-HVR- | ATGKYYETYLGFDV | 116 |
| H3 | | |
| mAb6_2.10-VH | ELQLQESGPGLVKPSETLSLTCTVSGGSITSSNYYWGWIRQPPGKGLEWIG | 117 |
| | SIDYTGSTYYQPSLKSRVTISVDTSKNQFSLKLSSVTAADTAVYYCARGNY | |
| | YETYLGFDVWGQGTLVTVSS | |
| mAb6_2.10-HVR- | TSSNYYW | 118 |
| H1 | | |
| mAb6_2.10-HVR- | SIDYTGSTYYQP | 119 |
| H2 | | |
| mAb6_2.10-HVR- | ARGNYYETYLGFDV | 120 |
| H3 | | |
| mAb2.1-VH | ELQLQESGPGLVKPSETLSLTCTVSGGSISDSSYYWGWIRQPPGKGLEWIG | 121 |
| | SIYYTGNTYYNSSLKSRVTISVDTSKNQFSLKLSSVTAADTAVYYCARVRY | |
| | GVGVPRYFDPWGQGTLVTVSS | |
| mAb2.1-HVR-H1 | SDSSYYW | 122 |
| mAb2.1-HVR-H2 | SIYYTGNTYYNS | 123 |
| mAb2.1-HVR-H3 | ARVRYGVGVPRYFDP | 124 |
| mAb2.2-VH | ELQLQESGPGLVKPSETLSLTCTVSGGSISESSYYWGWIRQPPGKGLEWIG | 125 |
| | SIYYTGNTYYNPSLKSRVTISVDTSKNQFSLKLSSVTAADTAVYYCAGVRY | |
| | GVGVPRYFDPWGQGTLVTVSS | |
| mAb2.2-HVR-H1 | SESSYYW | 126 |
| mAb2.2-HVR-H2 | SIYYTGNTYYNP | 127 |
| mAb2.2-HVR-H3 | AGVRYGVGVPRYFDP | 128 |
| mAb2.3-VH | ELQLQESGPGLVKPSETLSLTCTVSGGSISTSSDYWGWIRQPPGKGLEWIG | 129 |
| | SIYYTGNTYYLPSLKSRVTISVDTSKNQFSLKLSSVTAADTAVYYCSRVRY | |
| | GVGVPRYFDPWGQGTLVTVSS | |
| mAb2.3-HVR-H1 | STSSDYW | 130 |
| mAb2.3-HVR-H2 | SIYYTGNTYYLP | 131 |
| mAb2.3-HVR-H3 | SRVRYGVGVPRYFDP | 132 |
| mAb2.4-VH | ELQLQESGPGLVKPSETLSLTCTVSGGSISNSSYYWGWIRQPPGKGLEWIG | 133 |
| | SIYYTGNTYYLPSLKSRVTISVDTSKNQFSLKLSSVTAADTAVYYCARVRY | |
| | GVGVPRYFDPWGQGTLVTVSS | |
| mAb2.4-HVR-H1 | SNSSYYW | 134 |
| mAb2.4-HVR-H2 | SIYYTGNTYYLP | 135 |
| mAb2.4-HVR-H3 | ARVRYGVGVPRYFDP | 136 |
| mAb2.5-VH | ELQLQESGPGLVKPSETLSLTCTVSGGSISESSYYWGWIRQPPGKGLEWIG | 137 |
| | SIYYTGNTYYLPSLKSRVTISVDTSKNQFSLKLSSVTAADTAVYYCARVRY | |
| | GVGVPRYFDPWGQGTLVTVSS | |
| mAb2.5-HVR-H1 | SESSYYW | 138 |
| mAb2.5-HVR-H2 | SIYYTGNTYYLP | 139 |
| mAb2.5-HVR-H3 | ARVRYGVGVPRYFDP | 140 |
| mAb2.6-VH | ELQLQESGPGLVKPSETLSLTCTVSGGSISTSSYHWGWIRQPPGKGLEWIG | 141 |
| | SIYYTGNTYYMPSLKSRVTISVDTSKNQFSLKLSSVTAADTAVYYCVRVRY | |
| | GVGVPRYFDPWGQGTLVTVSS | |
| mAb2.6-HVR-H1 | STSSYHW | 142 |
| mAb2.6-HVR-H2 | SIYYTGNTYYMP | 143 |
| mAb2.6-HVR-H3 | VRVRYGVGVPRYFDP | 144 |
| mAb2.7-VH | ELQLQESGPGLVKPSETLSLTCTVSGGSISRSSYYWGWIRQPPGKGLEWIG | 145 |
| | SIYYTGNTYYWPSLKSRVTISVDTSKNQFSLKLSSVTAADTAVYYCTRVRY | |
| | GVGVPRYFDPWGQGTLVTVSS | |
| mAb2.7-HVR-H1 | SRSSYYW | 146 |
| mAb2.7-HVR-H2 | SIYYTGNTYYWP | 147 |
| mAb2.7-HVR-H3 | TRVRYGVGVPRYFDP | 148 |
| mAb2.8-VH | ELQLQESGPGLVKPSETLSLTCTVSGGSISDSSYYWGWIRQPPGKGLEWIG | 149 |
| | SIYYTGETYYAPSLKSRVTISVDTSKNQFSLKLSSVTAADTAVYYCARLRY | |
| | GVGVPRYFDPWGQGTLVTVSS | |
| mAb2.8-HVR-H1 | SDSSYYW | 150 |
| mAb2.8-HVR-H2 | SIYYTGETYYAP | 151 |
| mAb2.8-HVR-H3 | ARLRYGVGVPRYFDP | 152 |
| mAb2.9-VH | ELQLQESGPGLVKPSETLSLTCTVSGGSISDSSYYWGWIRQPPGKGLEWIG | 153 |
| | SIYYTGETYYAPSLKSRVTISVDTSKNQFSLKLSSVTAADTAVYYCARVKY | |
| | GVGVPRYFDPWGQGTLVTVSS | |
| mAb2.9-HVR-H1 | SDSSYYW | 154 |
| mAb2.9-HVR-H2 | SIYYTGETYYAP | 155 |
| mAb2.9-HVR-H3 | ARVKYGVGVPRYFDP | 156 |
| mAb2.10-VH | ELQLQESGPGLVKPSETLSLTCTVSGGSISDSSYYWGWIRQPPGKGLEWIG | 157 |
| | SIYYTGETYYAPSLKSRVTISVDTSKNQFSLKLSSVTAADTAVYYCARVRY | |
| | GVGVPRHFDPWGQGTLVTVSS | |
| mAb2.10-HVR- | SDSSYYW | 158 |
| H1 | | |
| mAb2.10-HVR- | SIYYTGETYYAP | 159 |
| H2 | | |
| mAb2.10-HVR- | ARVRYGVGVPRHFDP | 160 |
| H3 | | |
| mAb2.11-VH | ELQLQESGPGLVKPSETLSLTCTVSGGSISESSYYWGWIRQPPGKGLEWIG | 161 |
| | SIYYTGETYYAPSLKSRVTISVDTSKNQFSLKLSSVTAADTAVYYCARLRY | |
| | GVGVPRYFDPWGQGTLVTVSS | |
| mAb2.11-HVR- | SESSYYW | 162 |
| H1 | | |
| mAb2.11-HVR- | SIYYTGETYYAP | 163 |
| H2 | | |
| mAb2.11-HVR- | ARLRYGVGVPRYFDP | 164 |
| H3 | | |
| mAb2.12-VH | ELQLQESGPGLVKPSETLSLTCTVSGGSISESSYYWGWIRQPPGKGLEWIG | 165 |
| | SIYYTGETYYAPSLKSRVTISVDTSKNQFSLKLSSVTAADTAVYYCARVKY | |
| | GVGVPRYFDPWGQGTLVTVSS | |
| mAb2.12-HVR- | SESSYYW | 166 |
| H1 | | |
| mAb2.12-HVR- | SIYYTGETYYAP | 167 |
| H2 | | |
| mAb2.12-HVR- | ARVKYGVGVPRYFDP | 168 |
| H3 | | |
| mAb2, mAb6_2, | ESVLTQPPSVSGAPGQRVTISCTGSSSNIGAHYDVHWYQQLPGTAPKLLIY | 169 |
| and mAb6_2.7 and | GNDNRPSGVPDRFSGSKSGTSASLAITGLQAEDEADYYCQSYDYSLSGYVF | |
| mAb2.10-LC | GGGTKLTVLGQPKAAPSVTLFPPSSEELQANKATLVCLISDFYPGAVTVAW | |
| | KADSSPVKAGVETTTPSKQSNNKYAASSYLSLTPEQWKSHKSYSCQVTHEG | |
| | STVEKTVAPTECS | |
| mAb6-LC | ESVLTQPPSVSGAPGQRVTISCTGSSSNIGAGYDVHWYQQLPGTAPKLLIY | 242 |
| | GNTNRPSGVPDRFSGSKSGTSASLAITGLQAEDEADYYCQSYDISLSGWVF | |
| | GGGTKLTVLGQPKAAPSVTLFPPSSEELQANKATLVCLISDFYPGAVTVAW | |
| | KADSSPVKAGVETTTPSKQSNNKYAASSYLSLTPEQWKSHKSYSCQVTHEG | |
| | STVEKTVAPTECS | |
| MAb6.0-LC | QESVLTQPPSVSGAPGQRVTISCTGSSSNIGAGYDVHWYQQLPGTAPKLLI | 247 |
| | YGNTNRPSGVPDRFSGSKSGTSASLAITGLQAEDEADYYCQSYDISLSGWV | |
| | FGGGTKLTVLGQPKAAPSVTLFPPSSEELQANKATLVCLISDFYPGAVTVA | |
| | WKADSSPVKAGVETTTPSKQSNNKYAASSYLSLTPEQWKSHKSYSCQVTHE | |
| | GSTVEKTVAPTECS | |
| mAb6.0 and | QLQLQESGPGLVKPSETLSLTCTVSGGSITSSNYYWGWIRQPPGKGLEWIG | 248 |
| mAb6.0_2.0-HC | SIDYTGSTYYNPSLKSRVTISVDTSKNQFSLKLSSVTAADTAVYYCARGKY | |
| | YETYLGFDVWGQGTLVTVSSASTKGPSVFPLAPSSKSTSGGTAALGCLVKD | |
| | YFPEPVTVSWNSGALTSGVHTFPAVLQSSGLYSLSSVVTVPSSSLGTQTYI | |
| | CNVNHKPSNTKVDKKVEPKSCDKTHTCPPCPAPELLGGPSVFLFPPKPKDT | |
| | LMISRTPEVTCVVVDVSHEDPEVKFNWYVDGVEVHNAKTKPREEQYGSTYR | |
| | VVSVLTVLHQDWLNGKEYKCKVSNKALPAPIEKTISKAKGQPREPQVYTLP | |
| | PSRDELTKNQVSLTCLVKGFYPSDIAVEWESNGQPENNYKTTPPVLDSDGS | |
| | FFLYSKLTVDKSRWQQGNVFSCSVMHEALHNHYTQKSLSLSPG | |
| mAb6.0 and | QLQLQESGPGLVKPSETLSLTCTVSGGSITSSNYYWGWIRQPPGKGLEWIG | 249 |
| mAb6.0_2.0-HC | SIDYTGSTYYNPSLKSRVTISVDTSKNQFSLKLSSVTAADTAVYYCARGKY | |
| (knob) | YETYLGFDVWGQGTLVTVSSASTKGPSVFPLAPSSKSTSGGTAALGCLVKD | |
| | YFPEPVTVSWNSGALTSGVHTFPAVLQSSGLYSLSSVVTVPSSSLGTQTYI | |
| | CNVNHKPSNTKVDKKVEPKSCDKTHTCPPCPAPELLGGPSVFLFPPKPKDT | |
| | LMISRTPEVTCVVVDVSHEDPEVKFNWYVDGVEVHNAKTKPREEQYGSTYR | |
| | VVSVLTVLHQDWLNGKEYKCKVSNKALPAPIEKTISKAKGQPREPQVYTLP | |
| | PSRDELTKNQVSLWCLVKGFYPSDIAVEWESNGQPENNYKTTPPVLDSDGS | |
| | FFLYSKLTVDKSRWQQGNVFSCSVMHEALHNHYTQKSLSLSPG | |
| mAb6.0 and | QLQLQESGPGLVKPSETLSLTCTVSGGSITSSNYYWGWIRQPPGKGLEWIG | 250 |
| mAb6.0_2.0-HC | SIDYTGSTYYNPSLKSRVTISVDTSKNQFSLKLSSVTAADTAVYYCARGKY | |
| (hole) | YETYLGFDVWGQGTLVTVSSASTKGPSVFPLAPSSKSTSGGTAALGCLVKD | |
| | YFPEPVTVSWNSGALTSGVHTFPAVLQSSGLYSLSSVVTVPSSSLGTQTYI | |
| | CNVNHKPSNTKVDKKVEPKSCDKTHTCPPCPAPELLGGPSVFLFPPKPKDT | |
| | LMISRTPEVTCVVVDVSHEDPEVKFNWYVDGVEVHNAKTKPREEQYGSTYR | |
| | VVSVLTVLHQDWLNGKEYKCKVSNKALPAPIEKTISKAKGQPREPQVYTLP | |
| | PSRDELTKNQVSLSCAVKGFYPSDIAVEWESNGQPENNYKTTPPVLDSDGS | |
| | FFLVSKLTVDKSRWQQGNVFSCSVMHEALHNHYTQKSLSLSPG | |
| mAb6 and mAb6_2- | ELQLQESGPGLVKPSETLSLTCTVSGGSITSSNYYWGWIRQPPGKGLEWIG | 170 |
| HC | SIDYTGSTYYNPSLKSRVTISVDTSKNQFSLKLSSVTAADTAVYYCARGKY | |
| | YETYLGFDVWGQGTLVTVSSASTKGPSVFPLAPSSKSTSGGTAALGCLVKD | |
| | YFPEPVTVSWNSGALTSGVHTFPAVLQSSGLYSLSSVVTVPSSSLGTQTYI | |
| | CNVNHKPSNTKVDKKVEPKSCDKTHTCPPCPAPELLGGPSVFLFPPKPKDT | |
| | LMISRTPEVTCVVVDVSHEDPEVKFNWYVDGVEVHNAKTKPREEQYGSTYR | |
| | VVSVLTVLHQDWLNGKEYKCKVSNKALPAPIEKTISKAKGQPREPQVYTLP | |
| | PSRDELTKNQVSLTCLVKGFYPSDIAVEWESNGQPENNYKTTPPVLDSDGS | |
| | FFLYSKLTVDKSRWQQGNVFSCSVMHEALHNHYTQKSLSLSPG | |
| mAb6 and mAb6_2- | ELQLQESGPGLVKPSETLSLTCTVSGGSITSSNYYWGWIRQPPGKGLEWIG | 171 |
| HC (knob) | SIDYTGSTYYNPSLKSRVTISVDTSKNQFSLKLSSVTAADTAVYYCARGKY | |
| | YETYLGFDVWGQGTLVTVSSASTKGPSVFPLAPSSKSTSGGTAALGCLVKD | |
| | YFPEPVTVSWNSGALTSGVHTFPAVLQSSGLYSLSSVVTVPSSSLGTQTYI | |
| | CNVNHKPSNTKVDKKVEPKSCDKTHTCPPCPAPELLGGPSVFLFPPKPKDT | |
| | LMISRTPEVTCVVVDVSHEDPEVKFNWYVDGVEVHNAKTKPREEQYGSTYR | |
| | VVSVLTVLHQDWLNGKEYKCKVSNKALPAPIEKTISKAKGQPREPQVYTLP | |
| | PSRDELTKNQVSLWCLVKGFYPSDIAVEWESNGQPENNYKTTPPVLDSDGS | |
| | FFLYSKLTVDKSRWQQGNVFSCSVMHEALHNHYTQKSLSLSPG | |
| mAb6 and mAb6_2- | ELQLQESGPGLVKPSETLSLTCTVSGGSITSSNYYWGWIRQPPGKGLEWIG | 172 |
| HC (hole) | SIDYTGSTYYNPSLKSRVTISVDTSKNQFSLKLSSVTAADTAVYYCARGKY | |
| | YETYLGFDVWGQGTLVTVSSASTKGPSVFPLAPSSKSTSGGTAALGCLVKD | |
| | YFPEPVTVSWNSGALTSGVHTFPAVLQSSGLYSLSSVVTVPSSSLGTQTYI | |
| | CNVNHKPSNTKVDKKVEPKSCDKTHTCPPCPAPELLGGPSVFLFPPKPKDT | |
| | LMISRTPEVTCVVVDVSHEDPEVKFNWYVDGVEVHNAKTKPREEQYGSTYR | |
| | VVSVLTVLHQDWLNGKEYKCKVSNKALPAPIEKTISKAKGQPREPQVYTLP | |
| | PSRDELTKNQVSLSCAVKGFYPSDIAVEWESNGQPENNYKTTPPVLDSDGS | |
| | FFLVSKLTVDKSRWQQGNVFSCSVMHEALHNHYTQKSLSLSPG | |
| MAb6_2.1-HC | ELQLQESGPGLVKPSETLSLTCTVSGGSITSTNYYWGWIRQPPGKGLEWIG | 173 |
| | NIDYTGSTYYNASLKSRVTISVDTSKNQFSLKLSSVTAADTAVYYCATGKY | |
| | YETYLGFDVWGQGTLVTVSSASTKGPSVFPLAPSSKSTSGGTAALGCLVKD | |
| | YFPEPVTVSWNSGALTSGVHTFPAVLQSSGLYSLSSVVTVPSSSLGTQTYI | |
| | CNVNHKPSNTKVDKKVEPKSCDKTHTCPPCPAPELLGGPSVFLFPPKPKDT | |
| | LMISRTPEVTCVVVDVSHEDPEVKFNWYVDGVEVHNAKTKPREEQYGSTYR | |
| | VVSVLTVLHQDWLNGKEYKCKVSNKALPAPIEKTISKAKGQPREPQVYTLP | |
| | PSRDELTKNQVSLTCLVKGFYPSDIAVEWESNGQPENNYKTTPPVLDSDGS | |
| | FFLYSKLTVDKSRWQQGNVFSCSVMHEALHNHYTQKSLSLSPG | |
| MAb6_2.1-HC | ELQLQESGPGLVKPSETLSLTCTVSGGSITSTNYYWGWIRQPPGKGLEWIG | 174 |
| (knob) | NIDYTGSTYYNASLKSRVTISVDTSKNQFSLKLSSVTAADTAVYYCATGKY | |
| | YETYLGFDVWGQGTLVTVSSASTKGPSVFPLAPSSKSTSGGTAALGCLVKD | |
| | YFPEPVTVSWNSGALTSGVHTFPAVLQSSGLYSLSSVVTVPSSSLGTQTYI | |
| | CNVNHKPSNTKVDKKVEPKSCDKTHTCPPCPAPELLGGPSVFLFPPKPKDT | |
| | LMISRTPEVTCVVVDVSHEDPEVKFNWYVDGVEVHNAKTKPREEQYGSTYR | |
| | VVSVLTVLHQDWLNGKEYKCKVSNKALPAPIEKTISKAKGQPREPQVYTLP | |
| | PSRDELTKNQVSLWCLVKGFYPSDIAVEWESNGQPENNYKTTPPVLDSDGS | |
| | FFLYSKLTVDKSRWQQGNVFSCSVMHEALHNHYTQKSLSLSPG | |
| MAb6_2.1-HC | ELQLQESGPGLVKPSETLSLTCTVSGGSITSTNYYWGWIRQPPGKGLEWIG | 175 |
| (hole) | NIDYTGSTYYNASLKSRVTISVDTSKNQFSLKLSSVTAADTAVYYCATGKY | |
| | YETYLGFDVWGQGTLVTVSSASTKGPSVFPLAPSSKSTSGGTAALGCLVKD | |
| | YFPEPVTVSWNSGALTSGVHTFPAVLQSSGLYSLSSVVTVPSSSLGTQTYI | |
| | CNVNHKPSNTKVDKKVEPKSCDKTHTCPPCPAPELLGGPSVFLFPPKPKDT | |
| | LMISRTPEVTCVVVDVSHEDPEVKFNWYVDGVEVHNAKTKPREEQYGSTYR | |
| | VVSVLTVLHQDWLNGKEYKCKVSNKALPAPIEKTISKAKGQPREPQVYTLP | |
| | PSRDELTKNQVSLSCAVKGFYPSDIAVEWESNGQPENNYKTTPPVLDSDGS | |
| | FFLVSKLTVDKSRWQQGNVFSCSVMHEALHNHYTQKSLSLSPG | |
| MAb6_2.2-HC | ELQLQESGPGLVKPSETLSLTCTVSGGSITSSNAYWGWIRQPPGKGLEWIG | 176 |
| | SIDYTGSTAYNPSLKSRVTISVDTSKNQFSLKLSSVTAADTAVYYCAHGKY | |
| | YETYLGFDVWGQGTLVTVSSASTKGPSVFPLAPSSKSTSGGTAALGCLVKD | |
| | YFPEPVTVSWNSGALTSGVHTFPAVLQSSGLYSLSSVVTVPSSSLGTQTYI | |
| | CNVNHKPSNTKVDKKVEPKSCDKTHTCPPCPAPELLGGPSVFLFPPKPKDT | |
| | LMISRTPEVTCVVVDVSHEDPEVKFNWYVDGVEVHNAKTKPREEQYGSTYR | |
| | VVSVLTVLHQDWLNGKEYKCKVSNKALPAPIEKTISKAKGQPREPQVYTLP | |
| | PSRDELTKNQVSLTCLVKGFYPSDIAVEWESNGQPENNYKTTPPVLDSDGS | |
| | FFLYSKLTVDKSRWQQGNVFSCSVMHEALHNHYTQKSLSLSPG | |
| MAb6_2.2-HC | ELQLQESGPGLVKPSETLSLTCTVSGGSITSSNAYWGWIRQPPGKGLEWIG | 177 |
| (knob) | SIDYTGSTAYNPSLKSRVTISVDTSKNQFSLKLSSVTAADTAVYYCAHGKY | |
| | YETYLGFDVWGQGTLVTVSSASTKGPSVFPLAPSSKSTSGGTAALGCLVKD | |
| | YFPEPVTVSWNSGALTSGVHTFPAVLQSSGLYSLSSVVTVPSSSLGTQTYI | |
| | CNVNHKPSNTKVDKKVEPKSCDKTHTCPPCPAPELLGGPSVFLFPPKPKDT | |
| | LMISRTPEVTCVVVDVSHEDPEVKFNWYVDGVEVHNAKTKPREEQYGSTYR | |
| | VVSVLTVLHQDWLNGKEYKCKVSNKALPAPIEKTISKAKGQPREPQVYTLP | |
| | PSRDELTKNQVSLWCLVKGFYPSDIAVEWESNGQPENNYKTTPPVLDSDGS | |
| | FFLYSKLTVDKSRWQQGNVFSCSVMHEALHNHYTQKSLSLSPG | |
| MAb6_2.2-HC | ELQLQESGPGLVKPSETLSLTCTVSGGSITSSNAYWGWIRQPPGKGLEWIG | 178 |
| (hole) | SIDYTGSTAYNPSLKSRVTISVDTSKNQFSLKLSSVTAADTAVYYCAHGKY | |
| | YETYLGFDVWGQGTLVTVSSASTKGPSVFPLAPSSKSTSGGTAALGCLVKD | |
| | YFPEPVTVSWNSGALTSGVHTFPAVLQSSGLYSLSSVVTVPSSSLGTQTYI | |
| | CNVNHKPSNTKVDKKVEPKSCDKTHTCPPCPAPELLGGPSVFLFPPKPKDT | |
| | LMISRTPEVTCVVVDVSHEDPEVKFNWYVDGVEVHNAKTKPREEQYGSTYR | |
| | VVSVLTVLHQDWLNGKEYKCKVSNKALPAPIEKTISKAKGQPREPQVYTLP | |
| | PSRDELTKNQVSLSCAVKGFYPSDIAVEWESNGQPENNYKTTPPVLDSDGS | |
| | FFLVSKLTVDKSRWQQGNVFSCSVMHEALHNHYTQKSLSLSPG | |
| MAb6_2.3-HC | ELQLQESGPGLVKPSETLSLTCTVSGGSITASNYYWGWIRQPPGKGLEWIG | 179 |
| | SIDYTGSTYYNTSLKSRVTISVDTSKNQFSLKLSSVTAADTAVYYCATGKY | |
| | YETYLGFDVWGQGTLVTVSSASTKGPSVFPLAPSSKSTSGGTAALGCLVKD | |
| | YFPEPVTVSWNSGALTSGVHTFPAVLQSSGLYSLSSVVTVPSSSLGTQTYI | |
| | CNVNHKPSNTKVDKKVEPKSCDKTHTCPPCPAPELLGGPSVFLFPPKPKDT | |
| | LMISRTPEVTCVVVDVSHEDPEVKFNWYVDGVEVHNAKTKPREEQYGSTYR | |
| | VVSVLTVLHQDWLNGKEYKCKVSNKALPAPIEKTISKAKGQPREPQVYTLP | |
| | PSRDELTKNQVSLTCLVKGFYPSDIAVEWESNGQPENNYKTTPPVLDSDGS | |
| | FFLYSKLTVDKSRWQQGNVFSCSVMHEALHNHYTQKSLSLSPG | |
| MAb6_2.3-HC | ELQLQESGPGLVKPSETLSLTCTVSGGSITASNYYWGWIRQPPGKGLEWIG | 180 |
| (knob) | SIDYTGSTYYNTSLKSRVTISVDTSKNQFSLKLSSVTAADTAVYYCATGKY | |
| | YETYLGFDVWGQGTLVTVSSASTKGPSVFPLAPSSKSTSGGTAALGCLVKD | |
| | YFPEPVTVSWNSGALTSGVHTFPAVLQSSGLYSLSSVVTVPSSSLGTQTYI | |
| | CNVNHKPSNTKVDKKVEPKSCDKTHTCPPCPAPELLGGPSVFLFPPKPKDT | |
| | LMISRTPEVTCVVVDVSHEDPEVKFNWYVDGVEVHNAKTKPREEQYGSTYR | |
| | VVSVLTVLHQDWLNGKEYKCKVSNKALPAPIEKTISKAKGQPREPQVYTLP | |
| | PSRDELTKNQVSLWCLVKGFYPSDIAVEWESNGQPENNYKTTPPVLDSDGS | |
| | FFLYSKLTVDKSRWQQGNVFSCSVMHEALHNHYTQKSLSLSPG | |
| MAb6_2.3-HC | ELQLQESGPGLVKPSETLSLTCTVSGGSITASNYYWGWIRQPPGKGLEWIG | 181 |
| (hole) | SIDYTGSTYYNTSLKSRVTISVDTSKNQFSLKLSSVTAADTAVYYCATGKY | |
| | YETYLGFDVWGQGTLVTVSSASTKGPSVFPLAPSSKSTSGGTAALGCLVKD | |
| | YFPEPVTVSWNSGALTSGVHTFPAVLQSSGLYSLSSVVTVPSSSLGTQTYI | |
| | CNVNHKPSNTKVDKKVEPKSCDKTHTCPPCPAPELLGGPSVFLFPPKPKDT | |
| | LMISRTPEVTCVVVDVSHEDPEVKFNWYVDGVEVHNAKTKPREEQYGSTYR | |
| | VVSVLTVLHQDWLNGKEYKCKVSNKALPAPIEKTISKAKGQPREPQVYTLP | |
| | PSRDELTKNQVSLSCAVKGFYPSDIAVEWESNGQPENNYKTTPPVLDSDGS | |
| | FFLVSKLTVDKSRWQQGNVFSCSVMHEALHNHYTQKSLSLSPG | |
| mAb6_2.4-HC | ELQLQESGPGLVKPSETLSLTCTVSGGSITASNYYWGWIRQPPGKGLEWIG | 182 |
| | SIDYTGSTYYNPSLKSRVTISVDTSKNQFSLKLSSVTAADTAVYYCATGKY | |
| | YETYLGFDVWGQGTLVTVSSASTKGPSVFPLAPSSKSTSGGTAALGCLVKD | |
| | YFPEPVTVSWNSGALTSGVHTFPAVLQSSGLYSLSSVVTVPSSSLGTQTYI | |
| | CNVNHKPSNTKVDKKVEPKSCDKTHTCPPCPAPELLGGPSVFLFPPKPKDT | |
| | LMISRTPEVTCVVVDVSHEDPEVKFNWYVDGVEVHNAKTKPREEQYGSTYR | |
| | VVSVLTVLHQDWLNGKEYKCKVSNKALPAPIEKTISKAKGQPREPQVYTLP | |
| | PSRDELTKNQVSLTCLVKGFYPSDIAVEWESNGQPENNYKTTPPVLDSDGS | |
| | FFLYSKLTVDKSRWQQGNVFSCSVMHEALHNHYTQKSLSLSPG | |
| MAb6_2.4-HC | ELQLQESGPGLVKPSETLSLTCTVSGGSITASNYYWGWIRQPPGKGLEWIG | 183 |
| (knob) | SIDYTGSTYYNPSLKSRVTISVDTSKNQFSLKLSSVTAADTAVYYCATGKY | |
| | YETYLGFDVWGQGTLVTVSSASTKGPSVFPLAPSSKSTSGGTAALGCLVKD | |
| | YFPEPVTVSWNSGALTSGVHTFPAVLQSSGLYSLSSVVTVPSSSLGTQTYI | |
| | CNVNHKPSNTKVDKKVEPKSCDKTHTCPPCPAPELLGGPSVFLFPPKPKDT | |
| | LMISRTPEVTCVVVDVSHEDPEVKFNWYVDGVEVHNAKTKPREEQYGSTYR | |
| | VVSVLTVLHQDWLNGKEYKCKVSNKALPAPIEKTISKAKGQPREPQVYTLP | |
| | PSRDELTKNQVSLWCLVKGFYPSDIAVEWESNGQPENNYKTTPPVLDSDGS | |
| | FFLYSKLTVDKSRWQQGNVFSCSVMHEALHNHYTQKSLSLSPG | |
| MAb6_2.4-HC | ELQLQESGPGLVKPSETLSLTCTVSGGSITASNYYWGWIRQPPGKGLEWIG | 184 |
| (hole) | SIDYTGSTYYNPSLKSRVTISVDTSKNQFSLKLSSVTAADTAVYYCATGKY | |
| | YETYLGFDVWGQGTLVTVSSASTKGPSVFPLAPSSKSTSGGTAALGCLVKD | |
| | YFPEPVTVSWNSGALTSGVHTFPAVLQSSGLYSLSSVVTVPSSSLGTQTYI | |
| | CNVNHKPSNTKVDKKVEPKSCDKTHTCPPCPAPELLGGPSVFLFPPKPKDT | |
| | LMISRTPEVTCVVVDVSHEDPEVKFNWYVDGVEVHNAKTKPREEQYGSTYR | |
| | VVSVLTVLHQDWLNGKEYKCKVSNKALPAPIEKTISKAKGQPREPQVYTLP | |
| | PSRDELTKNQVSLSCAVKGFYPSDIAVEWESNGQPENNYKTTPPVLDSDGS | |
| | FFLVSKLTVDKSRWQQGNVFSCSVMHEALHNHYTQKSLSLSPG | |
| MAb6_2.5-HC | ELQLQESGPGLVKPSETLSLTCTVSGGSITASNYYWGWIRQPPGKGLEWIG | 185 |
| | SIDYTGSTYYEPSLKSRVTISVDTSKNQFSLKLSSVTAADTAVYYCATGSY | |
| | YETYLGFDVWGQGTLVTVSSASTKGPSVFPLAPSSKSTSGGTAALGCLVKD | |
| | YFPEPVTVSWNSGALTSGVHTFPAVLQSSGLYSLSSVVTVPSSSLGTQTYI | |
| | CNVNHKPSNTKVDKKVEPKSCDKTHTCPPCPAPELLGGPSVFLFPPKPKDT | |
| | LMISRTPEVTCVVVDVSHEDPEVKFNWYVDGVEVHNAKTKPREEQYGSTYR | |
| | VVSVLTVLHQDWLNGKEYKCKVSNKALPAPIEKTISKAKGQPREPQVYTLP | |
| | PSRDELTKNQVSLTCLVKGFYPSDIAVEWESNGQPENNYKTTPPVLDSDGS | |
| | FFLYSKLTVDKSRWQQGNVFSCSVMHEALHNHYTQKSLSLSPG | |
| MAb6_2.5-HC | ELQLQESGPGLVKPSETLSLTCTVSGGSITASNYYWGWIRQPPGKGLEWIG | 186 |
| (knob) | SIDYTGSTYYEPSLKSRVTISVDTSKNQFSLKLSSVTAADTAVYYCATGSY | |
| | YETYLGFDVWGQGTLVTVSSASTKGPSVFPLAPSSKSTSGGTAALGCLVKD | |
| | YFPEPVTVSWNSGALTSGVHTFPAVLQSSGLYSLSSVVTVPSSSLGTQTYI | |
| | CNVNHKPSNTKVDKKVEPKSCDKTHTCPPCPAPELLGGPSVFLFPPKPKDT | |
| | LMISRTPEVTCVVVDVSHEDPEVKFNWYVDGVEVHNAKTKPREEQYGSTYR | |
| | VVSVLTVLHQDWLNGKEYKCKVSNKALPAPIEKTISKAKGQPREPQVYTLP | |
| | PSRDELTKNQVSLWCLVKGFYPSDIAVEWESNGQPENNYKTTPPVLDSDGS | |
| | FFLYSKLTVDKSRWQQGNVFSCSVMHEALHNHYTQKSLSLSPG | |
| MAb6_2.5-HC | ELQLQESGPGLVKPSETLSLTCTVSGGSITASNYYWGWIRQPPGKGLEWIG | 187 |
| (hole) | SIDYTGSTYYEPSLKSRVTISVDTSKNQFSLKLSSVTAADTAVYYCATGSY | |
| | YETYLGFDVWGQGTLVTVSSASTKGPSVFPLAPSSKSTSGGTAALGCLVKD | |
| | YFPEPVTVSWNSGALTSGVHTFPAVLQSSGLYSLSSVVTVPSSSLGTQTYI | |
| | CNVNHKPSNTKVDKKVEPKSCDKTHTCPPCPAPELLGGPSVFLFPPKPKDT | |
| | LMISRTPEVTCVVVDVSHEDPEVKFNWYVDGVEVHNAKTKPREEQYGSTYR | |
| | VVSVLTVLHQDWLNGKEYKCKVSNKALPAPIEKTISKAKGQPREPQVYTLP | |
| | PSRDELTKNQVSLSCAVKGFYPSDIAVEWESNGQPENNYKTTPPVLDSDGS | |
| | FFLVSKLTVDKSRWQQGNVFSCSVMHEALHNHYTQKSLSLSPG | |
| MAb6_2.6-HC | ELQLQESGPGLVKPSETLSLTCTVSGGSITASNYYWGWIRQPPGKGLEWIG | 188 |
| | SIDYTGSTYYEPSLKSRVTISVDTSKNQFSLKLSSVTAADTAVYYCATGNY | |
| | YETYLGFDVWGQGTLVTVSSASTKGPSVFPLAPSSKSTSGGTAALGCLVKD | |
| | YFPEPVTVSWNSGALTSGVHTFPAVLQSSGLYSLSSVVTVPSSSLGTQTYI | |
| | CNVNHKPSNTKVDKKVEPKSCDKTHTCPPCPAPELLGGPSVFLFPPKPKDT | |
| | LMISRTPEVTCVVVDVSHEDPEVKFNWYVDGVEVHNAKTKPREEQYGSTYR | |
| | VVSVLTVLHQDWLNGKEYKCKVSNKALPAPIEKTISKAKGQPREPQVYTLP | |
| | PSRDELTKNQVSLTCLVKGFYPSDIAVEWESNGQPENNYKTTPPVLDSDGS | |
| | FFLYSKLTVDKSRWQQGNVFSCSVMHEALHNHYTQKSLSLSPG | |
| MAb6_2.6-HC | ELQLQESGPGLVKPSETLSLTCTVSGGSITASNYYWGWIRQPPGKGLEWIG | 189 |
| (knob) | SIDYTGSTYYEPSLKSRVTISVDTSKNQFSLKLSSVTAADTAVYYCATGNY | |
| | YETYLGFDVWGQGTLVTVSSASTKGPSVFPLAPSSKSTSGGTAALGCLVKD | |
| | YFPEPVTVSWNSGALTSGVHTFPAVLQSSGLYSLSSVVTVPSSSLGTQTYI | |
| | CNVNHKPSNTKVDKKVEPKSCDKTHTCPPCPAPELLGGPSVFLFPPKPKDT | |
| | LMISRTPEVTCVVVDVSHEDPEVKFNWYVDGVEVHNAKTKPREEQYGSTYR | |
| | VVSVLTVLHQDWLNGKEYKCKVSNKALPAPIEKTISKAKGQPREPQVYTLP | |
| | PSRDELTKNQVSLWCLVKGFYPSDIAVEWESNGQPENNYKTTPPVLDSDGS | |
| | FFLYSKLTVDKSRWQQGNVFSCSVMHEALHNHYTQKSLSLSPG | |
| MAb6_2.6-HC | ELQLQESGPGLVKPSETLSLTCTVSGGSITASNYYWGWIRQPPGKGLEWIG | 190 |
| (hole) | SIDYTGSTYYEPSLKSRVTISVDTSKNQFSLKLSSVTAADTAVYYCATGNY | |
| | YETYLGFDVWGQGTLVTVSSASTKGPSVFPLAPSSKSTSGGTAALGCLVKD | |
| | YFPEPVTVSWNSGALTSGVHTFPAVLQSSGLYSLSSVVTVPSSSLGTQTYI | |
| | CNVNHKPSNTKVDKKVEPKSCDKTHTCPPCPAPELLGGPSVFLFPPKPKDT | |
| | LMISRTPEVTCVVVDVSHEDPEVKFNWYVDGVEVHNAKTKPREEQYGSTYR | |
| | VVSVLTVLHQDWLNGKEYKCKVSNKALPAPIEKTISKAKGQPREPQVYTLP | |
| | PSRDELTKNQVSLSCAVKGFYPSDIAVEWESNGQPENNYKTTPPVLDSDGS | |
| | FFLVSKLTVDKSRWQQGNVFSCSVMHEALHNHYTQKSLSLSPG | |
| MAb6_2.7-HC | ELQLQESGPGLVKPSETLSLTCTVSGGSITASNTYWGWIRQPPGKGLEWIG | 191 |
| | SIDYTGSTYYNPSLKSRVTISVDTSKNQFSLKLSSVTAADTAVYYCATGKY | |
| | YETYLGFDVWGQGTLVTVSSASTKGPSVFPLAPSSKSTSGGTAALGCLVKD | |
| | YFPEPVTVSWNSGALTSGVHTFPAVLQSSGLYSLSSVVTVPSSSLGTQTYI | |
| | CNVNHKPSNTKVDKKVEPKSCDKTHTCPPCPAPELLGGPSVFLFPPKPKDT | |
| | LMISRTPEVTCVVVDVSHEDPEVKFNWYVDGVEVHNAKTKPREEQYGSTYR | |
| | VVSVLTVLHQDWLNGKEYKCKVSNKALPAPIEKTISKAKGQPREPQVYTLP | |
| | PSRDELTKNQVSLTCLVKGFYPSDIAVEWESNGQPENNYKTTPPVLDSDGS | |
| | FFLYSKLTVDKSRWQQGNVFSCSVMHEALHNHYTQKSLSLSPG | |
| MAb6_2.7-HC | ELQLQESGPGLVKPSETLSLTCTVSGGSITASNTYWGWIRQPPGKGLEWIG | 192 |
| (knob) | SIDYTGSTYYNPSLKSRVTISVDTSKNQFSLKLSSVTAADTAVYYCATGKY | |
| | YETYLGFDVWGQGTLVTVSSASTKGPSVFPLAPSSKSTSGGTAALGCLVKD | |
| | YFPEPVTVSWNSGALTSGVHTFPAVLQSSGLYSLSSVVTVPSSSLGTQTYI | |
| | CNVNHKPSNTKVDKKVEPKSCDKTHTCPPCPAPELLGGPSVFLFPPKPKDT | |
| | LMISRTPEVTCVVVDVSHEDPEVKFNWYVDGVEVHNAKTKPREEQYGSTYR | |
| | VVSVLTVLHQDWLNGKEYKCKVSNKALPAPIEKTISKAKGQPREPQVYTLP | |
| | PSRDELTKNQVSLWCLVKGFYPSDIAVEWESNGQPENNYKTTPPVLDSDGS | |
| | FFLYSKLTVDKSRWQQGNVFSCSVMHEALHNHYTQKSLSLSPG | |
| MAb6_2.7-HC | ELQLQESGPGLVKPSETLSLTCTVSGGSITASNTYWGWIRQPPGKGLEWIG | 193 |
| (hole) | SIDYTGSTYYNPSLKSRVTISVDTSKNQFSLKLSSVTAADTAVYYCATGKY | |
| | YETYLGFDVWGQGTLVTVSSASTKGPSVFPLAPSSKSTSGGTAALGCLVKD | |
| | YFPEPVTVSWNSGALTSGVHTFPAVLQSSGLYSLSSVVTVPSSSLGTQTYI | |
| | CNVNHKPSNTKVDKKVEPKSCDKTHTCPPCPAPELLGGPSVFLFPPKPKDT | |
| | LMISRTPEVTCVVVDVSHEDPEVKFNWYVDGVEVHNAKTKPREEQYGSTYR | |
| | VVSVLTVLHQDWLNGKEYKCKVSNKALPAPIEKTISKAKGQPREPQVYTLP | |
| | PSRDELTKNQVSLSCAVKGFYPSDIAVEWESNGQPENNYKTTPPVLDSDGS | |
| | FFLVSKLTVDKSRWQQGNVFSCSVMHEALHNHYTQKSLSLSPG | |
| MAb6_2.8-HC | ELQLQESGPGLVKPSETLSLTCTVSGGSITASNYYWGWIRQPPGKGLEWIG | 194 |
| | SIDYTGSTYYNPSLKSRVTISVDTSKNQFSLKLSSVTAADTAVYYCASGKY | |
| | YETYLGFDVWGQGTLVTVSSASTKGPSVFPLAPSSKSTSGGTAALGCLVKD | |
| | YFPEPVTVSWNSGALTSGVHTFPAVLQSSGLYSLSSVVTVPSSSLGTQTYI | |
| | CNVNHKPSNTKVDKKVEPKSCDKTHTCPPCPAPELLGGPSVFLFPPKPKDT | |
| | LMISRTPEVTCVVVDVSHEDPEVKFNWYVDGVEVHNAKTKPREEQYGSTYR | |
| | VVSVLTVLHQDWLNGKEYKCKVSNKALPAPIEKTISKAKGQPREPQVYTLP | |
| | PRDELTKNQVSLTCLVKGFYPSDIAVEWESNGQPENNYKTTPPVLDSDGS | |
| | FFLYSKLTVDKSRWQQGNVFSCSVMHEALHNHYTQKSLSLSPG | |
| MAb6_2.8-HC | ELQLQESGPGLVKPSETLSLTCTVSGGSITASNYYWGWIRQPPGKGLEWIG | 195 |
| (knob) | SIDYTGSTYYNPSLKSRVTISVDTSKNQFSLKLSSVTAADTAVYYCASGKY | |
| | YETYLGFDVWGQGTLVTVSSASTKGPSVFPLAPSSKSTSGGTAALGCLVKD | |
| | YFPEPVTVSWNSGALTSGVHTFPAVLQSSGLYSLSSVVTVPSSSLGTQTYI | |
| | CNVNHKPSNTKVDKKVEPKSCDKTHTCPPCPAPELLGGPSVFLFPPKPKDT | |
| | LMISRTPEVTCVVVDVSHEDPEVKFNWYVDGVEVHNAKTKPREEQYGSTYR | |
| | VVSVLTVLHQDWLNGKEYKCKVSNKALPAPIEKTISKAKGQPREPQVYTLP | |
| | PSRDELTKNQVSLWCLVKGFYPSDIAVEWESNGQPENNYKTTPPVLDSDGS | |
| | FFLYSKLTVDKSRWQQGNVFSCSVMHEALHNHYTQKSLSLSPG | |
| MAb6_2.8-HC | ELQLQESGPGLVKPSETLSLTCTVSGGSITASNYYWGWIRQPPGKGLEWIG | 196 |
| (hole) | SIDYTGSTYYNPSLKSRVTISVDTSKNQFSLKLSSVTAADTAVYYCASGKY | |
| | YETYLGFDVWGQGTLVTVSSASTKGPSVFPLAPSSKSTSGGTAALGCLVKD | |
| | YFPEPVTVSWNSGALTSGVHTFPAVLQSSGLYSLSSVVTVPSSSLGTQTYI | |
| | CNVNHKPSNTKVDKKVEPKSCDKTHTCPPCPAPELLGGPSVFLFPPKPKDT | |
| | LMISRTPEVTCVVVDVSHEDPEVKFNWYVDGVEVHNAKTKPREEQYGSTYR | |
| | VVSVLTVLHQDWLNGKEYKCKVSNKALPAPIEKTISKAKGQPREPQVYTLP | |
| | PSRDELTKNQVSLSCAVKGFYPSDIAVEWESNGQPENNYKTTPPVLDSDGS | |
| | FFLVSKLTVDKSRWQQGNVFSCSVMHEALHNHYTQKSLSLSPG | |
| MAb6_2.9-HC | ELQLQESGPGLVKPSETLSLTCTVSGGSITSSNYYWGWIRQPPGKGLEWIG | 197 |
| | SIDYTGSTYYNPSLKSRVTISVDTSKNQFSLKLSSVTAADTAVYYCATGKY | |
| | YETYLGFDVWGQGTLVTVSSASTKGPSVFPLAPSSKSTSGGTAALGCLVKD | |
| | YFPEPVTVSWNSGALTSGVHTFPAVLQSSGLYSLSSVVTVPSSSLGTQTYI | |
| | CNVNHKPSNTKVDKKVEPKSCDKTHTCPPCPAPELLGGPSVFLFPPKPKDT | |
| | LMISRTPEVTCVVVDVSHEDPEVKFNWYVDGVEVHNAKTKPREEQYGSTYR | |
| | VVSVLTVLHQDWLNGKEYKCKVSNKALPAPIEKTISKAKGQPREPQVYTLP | |
| | PSRDELTKNQVSLTCLVKGFYPSDIAVEWESNGQPENNYKTTPPVLDSDGS | |
| | FFLYSKLTVDKSRWQQGNVFSCSVMHEALHNHYTQKSLSLSPG | |
| MAb6_2.9-HC | ELQLQESGPGLVKPSETLSLTCTVSGGSITSSNYYWGWIRQPPGKGLEWIG | 198 |
| (knob) | SIDYTGSTYYNPSLKSRVTISVDTSKNQFSLKLSSVTAADTAVYYCATGKY | |
| | YETYLGFDVWGQGTLVTVSSASTKGPSVFPLAPSSKSTSGGTAALGCLVKD | |
| | YFPEPVTVSWNSGALTSGVHTFPAVLQSSGLYSLSSVVTVPSSSLGTQTYI | |
| | CNVNHKPSNTKVDKKVEPKSCDKTHTCPPCPAPELLGGPSVFLFPPKPKDT | |
| | LMISRTPEVTCVVVDVSHEDPEVKFNWYVDGVEVHNAKTKPREEQYGSTYR | |
| | VVSVLTVLHQDWLNGKEYKCKVSNKALPAPIEKTISKAKGQPREPQVYTLP | |
| | PSRDELTKNQVSLWCLVKGFYPSDIAVEWESNGQPENNYKTTPPVLDSDGS | |
| | FFLYSKLTVDKSRWQQGNVFSCSVMHEALHNHYTQKSLSLSPG | |
| MAb6_2.9-HC | ELQLQESGPGLVKPSETLSLTCTVSGGSITSSNYYWGWIRQPPGKGLEWIG | 199 |
| (hole) | SIDYTGSTYYNPSLKSRVTISVDTSKNQFSLKLSSVTAADTAVYYCATGKY | |
| | YETYLGFDVWGQGTLVTVSSASTKGPSVFPLAPSSKSTSGGTAALGCLVKD | |
| | YFPEPVTVSWNSGALTSGVHTFPAVLQSSGLYSLSSVVTVPSSSLGTQTYI | |
| | CNVNHKPSNTKVDKKVEPKSCDKTHTCPPCPAPELLGGPSVFLFPPKPKDT | |
| | LMISRTPEVTCVVVDVSHEDPEVKFNWYVDGVEVHNAKTKPREEQYGSTYR | |
| | VVSVLTVLHQDWLNGKEYKCKVSNKALPAPIEKTISKAKGQPREPQVYTLP | |
| | PSRDELTKNQVSLSCAVKGFYPSDIAVEWESNGQPENNYKTTPPVLDSDGS | |
| | FFLVSKLTVDKSRWQQGNVFSCSVMHEALHNHYTQKSLSLSPG | |
| MAb6_2.10-HC | ELQLQESGPGLVKPSETLSLTCTVSGGSITSSNYYWGWIRQPPGKGLEWIG | 200 |
| | SIDYTGSTYYQPSLKSRVTISVDTSKNQFSLKLSSVTAADTAVYYCARGNY | |
| | YETYLGFDVWGQGTLVTVSSASTKGPSVFPLAPSSKSTSGGTAALGCLVKD | |
| | YFPEPVTVSWNSGALTSGVHTFPAVLQSSGLYSLSSVVTVPSSSLGTQTYI | |
| | CNVNHKPSNTKVDKKVEPKSCDKTHTCPPCPAPELLGGPSVFLFPPKPKDT | |
| | LMISRTPEVTCVVVDVSHEDPEVKFNWYVDGVEVHNAKTKPREEQYGSTYR | |
| | VVSVLTVLHQDWLNGKEYKCKVSNKALPAPIEKTISKAKGQPREPQVYTLP | |
| | PSRDELTKNQVSLTCLVKGFYPSDIAVEWESNGQPENNYKTTPPVLDSDGS | |
| | FFLYSKLTVDKSRWQQGNVFSCSVMHEALHNHYTQKSLSLSPG | |
| MAb6_2.10-HC | ELQLQESGPGLVKPSETLSLTCTVSGGSITSSNYYWGWIRQPPGKGLEWIG | 201 |
| (knob) | SIDYTGSTYYQPSLKSRVTISVDTSKNQFSLKLSSVTAADTAVYYCARGNY | |
| | YETYLGFDVWGQGTLVTVSSASTKGPSVFPLAPSSKSTSGGTAALGCLVKD | |
| | YFPEPVTVSWNSGALTSGVHTFPAVLQSSGLYSLSSVVTVPSSSLGTQTYI | |
| | CNVNHKPSNTKVDKKVEPKSCDKTHTCPPCPAPELLGGPSVFLFPPKPKDT | |
| | LMISRTPEVTCVVVDVSHEDPEVKFNWYVDGVEVHNAKTKPREEQYGSTYR | |
| | VVSVLTVLHQDWLNGKEYKCKVSNKALPAPIEKTISKAKGQPREPQVYTLP | |
| | PSRDELTKNQVSLWCLVKGFYPSDIAVEWESNGQPENNYKTTPPVLDSDGS | |
| | FFLYSKLTVDKSRWQQGNVFSCSVMHEALHNHYTQKSLSLSPG | |
| MAb6_2.10-HC | ELQLQESGPGLVKPSETLSLTCTVSGGSITSSNYYWGWIRQPPGKGLEWIG | 202 |
| (hole) | SIDYTGSTYYQPSLKSRVTISVDTSKNQFSLKLSSVTAADTAVYYCARGNY | |
| | YETYLGFDVWGQGTLVTVSSASTKGPSVFPLAPSSKSTSGGTAALGCLVKD | |
| | YFPEPVTVSWNSGALTSGVHTFPAVLQSSGLYSLSSVVTVPSSSLGTQTYI | |
| | CNVNHKPSNTKVDKKVEPKSCDKTHTCPPCPAPELLGGPSVFLFPPKPKDT | |
| | LMISRTPEVTCVVVDVSHEDPEVKFNWYVDGVEVHNAKTKPREEQYGSTYR | |
| | VVSVLTVLHQDWLNGKEYKCKVSNKALPAPIEKTISKAKGQPREPQVYTLP | |
| | PSRDELTKNQVSLSCAVKGFYPSDIAVEWESNGQPENNYKTTPPVLDSDGS | |
| | FFLVSKLTVDKSRWQQGNVFSCSVMHEALHNHYTQKSLSLSPG | |
| MAb2.0-HC | QLQLQESGPGLVKPSETLSLTCTVSGGSISTSSYYWGWIRQPPGKGLEWIG | 243 |
| | SIYYTGNTYYNPSLKSRVTISVDTSKNQFSLKLSSVTAADTAVYYCARVRY | |
| | GVGVPRYFDPWGQGTLVTVSSASTKGPSVFPLAPSSKSTSGGTAALGCLVK | |
| | DYFPEPVTVSWNSGALTSGVHTFPAVLQSSGLYSLSSVVTVPSSSLGTQTY | |
| | ICNVNHKPSNTKVDKKVEPKSCDKTHTCPPCPAPELLGGPSVFLFPPKPKD | |
| | TLMISRTPEVTCVVVDVSHEDPEVKFNWYVDGVEVHNAKTKPREEQYGSTY | |
| | RVVSVLTVLHQDWLNGKEYKCKVSNKALPAPIEKTISKAKGQPREPQVYTL | |
| | PPSRDELTKNQVSLTCLVKGFYPSDIAVEWESNGQPENNYKTTPPVLDSDG | |
| | SFFLYSKLTVDKSRWQQGNVFSCSVMHEALHNHYTQKSLSLSPG | |
| MAb2.0-HC | QLQLQESGPGLVKPSETLSLTCTVSGGSISTSSYYWGWIRQPPGKGLEWIG | 244 |
| (knob) | SIYYTGNTYYNPSLKSRVTISVDTSKNQFSLKLSSVTAADTAVYYCARVRY | |
| | GVGVPRYFDPWGQGTLVTVSSASTKGPSVFPLAPSSKSTSGGTAALGCLVK | |
| | DYFPEPVTVSWNSGALTSGVHTFPAVLQSSGLYSLSSVVTVPSSSLGTQTY | |
| | ICNVNHKPSNTKVDKKVEPKSCDKTHTCPPCPAPELLGGPSVFLFPPKPKD | |
| | TLMISRTPEVTCVVVDVSHEDPEVKFNWYVDGVEVHNAKTKPREEQYGSTY | |
| | RVVSVLTVLHQDWLNGKEYKCKVSNKALPAPIEKTISKAKGQPREPQVYTL | |
| | PPSRDELTKNQVSLWCLVKGFYPSDIAVEWESNGQPENNYKTTPPVLDSDG | |
| | SFFLYSKLTVDKSRWQQGNVFSCSVMHEALHNHYTQKSLSLSPG | |
| MAb2.0-HC | QLQLQESGPGLVKPSETLSLTCTVSGGSISTSSYYWGWIRQPPGKGLEWIG | 245 |
| (hole) | SIYYTGNTYYNPSLKSRVTISVDTSKNQFSLKLSSVTAADTAVYYCARVRY | |
| | GVGVPRYFDPWGQGTLVTVSSASTKGPSVFPLAPSSKSTSGGTAALGCLVK | |
| | DYFPEPVTVSWNSGALTSGVHTFPAVLQSSGLYSLSSVVTVPSSSLGTQTY | |
| | ICNVNHKPSNTKVDKKVEPKSCDKTHTCPPCPAPELLGGPSVFLFPPKPKD | |
| | TLMISRTPEVTCVVVDVSHEDPEVKFNWYVDGVEVHNAKTKPREEQYGSTY | |
| | RVVSVLTVLHQDWLNGKEYKCKVSNKALPAPIEKTISKAKGQPREPQVYTL | |
| | PPSRDELTKNQVSLSCAVKGFYPSDIAVEWESNGQPENNYKTTPPVLDSDG | |
| | SFFLVSKLTVDKSRWQQGNVFSCSVMHEALHNHYTQKSLSLSPG | |
| mAb2.0 and | QSVLTQPPSVSGAPGQRVTISCTGSSSNIGAHYDVHWYQQLPGTAPKLLIY | 246 |
| mAb6.0_2.0-LC | GNDNRPSGVPDRFSGSKSGTSASLAITGLQAEDEADYYCQSYDYSLSGYVF | |
| | GGGTKLTVLGQPKAAPSVTLFPPSSEELQANKATLVCLISDFYPGAVTVAW | |
| | KADSSPVKAGVETTTPSKQSNNKYAASSYLSLTPEQWKSHKSYSCQVTHEG | |
| | STVEKTVAPTECS | |
| mAb2-HC | ELQLQESGPGLVKPSETLSLTCTVSGGSISTSSYYWGWIRQPPGKGLEWIG | 203 |
| | SIYYTGNTYYNPSLKSRVTISVDTSKNQFSLKLSSVTAADTAVYYCARVRY | |
| | GVGVPRYFDPWGQGTLVTVSSASTKGPSVFPLAPSSKSTSGGTAALGCLVK | |
| | DYFPEPVTVSWNSGALTSGVHTFPAVLQSSGLYSLSSVVTVPSSSLGTQTY | |
| | ICNVNHKPSNTKVDKKVEPKSCDKTHTCPPCPAPELLGGPSVFLFPPKPKD | |
| | TLMISRTPEVTCVVVDVSHEDPEVKFNWYVDGVEVHNAKTKPREEQYGSTY | |
| | RVVSVLTVLHQDWLNGKEYKCKVSNKALPAPIEKTISKAKGQPREPQVYTL | |
| | PPSRDELTKNQVSLTCLVKGFYPSDIAVEWESNGQPENNYKTTPPVLDSDG | |
| | SFFLYSKLTVDKSRWQQGNVFSCSVMHEALHNHYTQKSLSLSPG | |
| MAb2-HC (knob) | ELQLQESGPGLVKPSETLSLTCTVSGGSISTSSYYWGWIRQPPGKGLEWIG | 204 |
| | SIYYTGNTYYNPSLKSRVTISVDTSKNQFSLKLSSVTAADTAVYYCARVRY | |
| | GVGVPRYFDPWGQGTLVTVSSASTKGPSVFPLAPSSKSTSGGTAALGCLVK | |
| | DYFPEPVTVSWNSGALTSGVHTFPAVLQSSGLYSLSSVVTVPSSSLGTQTY | |
| | ICNVNHKPSNTKVDKKVEPKSCDKTHTCPPCPAPELLGGPSVFLFPPKPKD | |
| | TLMISRTPEVTCVVVDVSHEDPEVKFNWYVDGVEVHNAKTKPREEQYGSTY | |
| | RVVSVLTVLHQDWLNGKEYKCKVSNKALPAPIEKTISKAKGQPREPQVYTL | |
| | PPSRDELTKNQVSLWCLVKGFYPSDIAVEWESNGQPENNYKTTPPVLDSDG | |
| | SFFLYSKLTVDKSRWQQGNVFSCSVMHEALHNHYTQKSLSLSPG | |
| MAb2-HC (hole) | ELQLQESGPGLVKPSETLSLTCTVSGGSISTSSYYWGWIRQPPGKGLEWIG | 205 |
| | SIYYTGNTYYNPSLKSRVTISVDTSKNQFSLKLSSVTAADTAVYYCARVRY | |
| | GVGVPRYFDPWGQGTLVTVSSASTKGPSVFPLAPSSKSTSGGTAALGCLVK | |
| | DYFPEPVTVSWNSGALTSGVHTFPAVLQSSGLYSLSSVVTVPSSSLGTQTY | |
| | ICNVNHKPSNTKVDKKVEPKSCDKTHTCPPCPAPELLGGPSVFLFPPKPKD | |
| | TLMISRTPEVTCVVVDVSHEDPEVKFNWYVDGVEVHNAKTKPREEQYGSTY | |
| | RVVSVLTVLHQDWLNGKEYKCKVSNKALPAPIEKTISKAKGQPREPQVYTL | |
| | PPSRDELTKNQVSLSCAVKGFYPSDIAVEWESNGQPENNYKTTPPVLDSDG | |
| | SFFLVSKLTVDKSRWQQGNVFSCSVMHEALHNHYTQKSLSLSPG | |
| mAb2.1-HC | ELQLQESGPGLVKPSETLSLTCTVSGGSISDSSYYWGWIRQPPGKGLEWIG | 206 |
| | SIYYTGNTYYNSSLKSRVTISVDTSKNQFSLKLSSVTAADTAVYYCARVRY | |
| | GVGVPRYFDPWGQGTLVTVSSASTKGPSVFPLAPSSKSTSGGTAALGCLVK | |
| | DYFPEPVTVSWNSGALTSGVHTFPAVLQSSGLYSLSSVVTVPSSSLGTQTY | |
| | ICNVNHKPSNTKVDKKVEPKSCDKTHTCPPCPAPELLGGPSVFLFPPKPKD | |
| | TLMISRTPEVTCVVVDVSHEDPEVKFNWYVDGVEVHNAKTKPREEQYGSTY | |
| | RVVSVLTVLHQDWLNGKEYKCKVSNKALPAPIEKTISKAKGQPREPQVYTL | |
| | PPSRDELTKNQVSLTCLVKGFYPSDIAVEWESNGQPENNYKTTPPVLDSDG | |
| | SFFLYSKLTVDKSRWQQGNVFSCSVMHEALHNHYTQKSLSLSPG | |
| MAb2.1-HC | ELQLQESGPGLVKPSETLSLTCTVSGGSISDSSYYWGWIRQPPGKGLEWIG | 207 |
| (knob) | SIYYTGNTYYNSSLKSRVTISVDTSKNQFSLKLSSVTAADTAVYYCARVRY | |
| | GVGVPRYFDPWGQGTLVTVSSASTKGPSVFPLAPSSKSTSGGTAALGCLVK | |
| | DYFPEPVTVSWNSGALTSGVHTFPAVLQSSGLYSLSSVVTVPSSSLGTQTY | |
| | ICNVNHKPSNTKVDKKVEPKSCDKTHTCPPCPAPELLGGPSVFLFPPKPKD | |
| | TLMISRTPEVTCVVVDVSHEDPEVKFNWYVDGVEVHNAKTKPREEQYGSTY | |
| | RVVSVLTVLHQDWLNGKEYKCKVSNKALPAPIEKTISKAKGQPREPQVYTL | |
| | PPSRDELTKNQVSLWCLVKGFYPSDIAVEWESNGQPENNYKTTPPVLDSDG | |
| | SFFLYSKLTVDKSRWQQGNVFSCSVMHEALHNHYTQKSLSLSPG | |
| MAb2.1-HC | ELQLQESGPGLVKPSETLSLTCTVSGGSISDSSYYWGWIRQPPGKGLEWIG | 208 |
| (hole) | SIYYTGNTYYNSSLKSRVTISVDTSKNQFSLKLSSVTAADTAVYYCARVRY | |
| | GVGVPRYFDPWGQGTLVTVSSASTKGPSVFPLAPSSKSTSGGTAALGCLVK | |
| | DYFPEPVTVSWNSGALTSGVHTFPAVLQSSGLYSLSSVVTVPSSSLGTQTY | |
| | ICNVNHKPSNTKVDKKVEPKSCDKTHTCPPCPAPELLGGPSVFLFPPKPKD | |
| | TLMISRTPEVTCVVVDVSHEDPEVKFNWYVDGVEVHNAKTKPREEQYGSTY | |
| | RVVSVLTVLHQDWLNGKEYKCKVSNKALPAPIEKTISKAKGQPREPQVYTL | |
| | PPSRDELTKNQVSLSCAVKGFYPSDIAVEWESNGQPENNYKTTPPVLDSDG | |
| | SFFLVSKLTVDKSRWQQGNVFSCSVMHEALHNHYTQKSLSLSPG | |
| mAb2.2-HC | ELQLQESGPGLVKPSETLSLTCTVSGGSISESSYYWGWIRQPPGKGLEWIG | 209 |
| | SIYYTGNTYYNPSLKSRVTISVDTSKNQFSLKLSSVTAADTAVYYCAGVRY | |
| | GVGVPRYFDPWGQGTLVTVSSASTKGPSVFPLAPSSKSTSGGTAALGCLVK | |
| | DYFPEPVTVSWNSGALTSGVHTFPAVLQSSGLYSLSSVVTVPSSSLGTQTY | |
| | ICNVNHKPSNTKVDKKVEPKSCDKTHTCPPCPAPELLGGPSVFLFPPKPKD | |
| | TLMISRTPEVTCVVVDVSHEDPEVKFNWYVDGVEVHNAKTKPREEQYGSTY | |
| | RVVSVLTVLHQDWLNGKEYKCKVSNKALPAPIEKTISKAKGQPREPQVYTL | |
| | PPSRDELTKNQVSLTCLVKGFYPSDIAVEWESNGQPENNYKTTPPVLDSDG | |
| | SFFLYSKLTVDKSRWQQGNVFSCSVMHEALHNHYTQKSLSLSPG | |
| MAb2.2-HC | ELQLQESGPGLVKPSETLSLTCTVSGGSISESSYYWGWIRQPPGKGLEWIG | 210 |
| (knob) | SIYYTGNTYYNPSLKSRVTISVDTSKNQFSLKLSSVTAADTAVYYCAGVRY | |
| | GVGVPRYFDPWGQGTLVTVSSASTKGPSVFPLAPSSKSTSGGTAALGCLVK | |
| | DYFPEPVTVSWNSGALTSGVHTFPAVLQSSGLYSLSSVVTVPSSSLGTQTY | |
| | ICNVNHKPSNTKVDKKVEPKSCDKTHTCPPCPAPELLGGPSVFLFPPKPKD | |
| | TLMISRTPEVTCVVVDVSHEDPEVKFNWYVDGVEVHNAKTKPREEQYGSTY | |
| | RVVSVLTVLHQDWLNGKEYKCKVSNKALPAPIEKTISKAKGQPREPQVYTL | |
| | PPSRDELTKNQVSLWCLVKGFYPSDIAVEWESNGQPENNYKTTPPVLDSDG | |
| | SFFLYSKLTVDKSRWQQGNVFSCSVMHEALHNHYTQKSLSLSPG | |
| MAb2.2-HC | ELQLQESGPGLVKPSETLSLTCTVSGGSISESSYYWGWIRQPPGKGLEWIG | 211 |
| (hole) | SIYYTGNTYYNPSLKSRVTISVDTSKNQFSLKLSSVTAADTAVYYCAGVRY | |
| | GVGVPRYFDPWGQGTLVTVSSASTKGPSVFPLAPSSKSTSGGTAALGCLVK | |
| | DYFPEPVTVSWNSGALTSGVHTFPAVLQSSGLYSLSSVVTVPSSSLGTQTY | |
| | ICNVNHKPSNTKVDKKVEPKSCDKTHTCPPCPAPELLGGPSVFLFPPKPKD | |
| | TLMISRTPEVTCVVVDVSHEDPEVKFNWYVDGVEVHNAKTKPREEQYGSTY | |
| | RVVSVLTVLHQDWLNGKEYKCKVSNKALPAPIEKTISKAKGQPREPQVYTL | |
| | PPSRDELTKNQVSLSCAVKGFYPSDIAVEWESNGQPENNYKTTPPVLDSDG | |
| | SFFLVSKLTVDKSRWQQGNVFSCSVMHEALHNHYTQKSLSLSPG | |
| MAb2.3-HC | ELQLQESGPGLVKPSETLSLTCTVSGGSISTSSDYWGWIRQPPGKGLEWIG | 212 |
| | SIYYTGNTYYLPSLKSRVTISVDTSKNQFSLKLSSVTAADTAVYYCSRVRY | |
| | GVGVPRYFDPWGQGTLVTVSSASTKGPSVFPLAPSSKSTSGGTAALGCLVK | |
| | DYFPEPVTVSWNSGALTSGVHTFPAVLQSSGLYSLSSVVTVPSSSLGTQTY | |
| | ICNVNHKPSNTKVDKKVEPKSCDKTHTCPPCPAPELLGGPSVFLFPPKPKD | |
| | TLMISRTPEVTCVVVDVSHEDPEVKFNWYVDGVEVHNAKTKPREEQYGSTY | |
| | RVVSVLTVLHQDWLNGKEYKCKVSNKALPAPIEKTISKAKGQPREPQVYTL | |
| | PPSRDELTKNQVSLTCLVKGFYPSDIAVEWESNGQPENNYKTTPPVLDSDG | |
| | SFFLYSKLTVDKSRWQQGNVFSCSVMHEALHNHYTQKSLSLSPG | |
| MAb2.3-HC | ELQLQESGPGLVKPSETLSLTCTVSGGSISTSSDYWGWIRQPPGKGLEWIG | 213 |
| (knob) | SIYYTGNTYYLPSLKSRVTISVDTSKNQFSLKLSSVTAADTAVYYCSRVRY | |
| | GVGVPRYFDPWGQGTLVTVSSASTKGPSVFPLAPSSKSTSGGTAALGCLVK | |
| | DYFPEPVTVSWNSGALTSGVHTFPAVLQSSGLYSLSSVVTVPSSSLGTQTY | |
| | ICNVNHKPSNTKVDKKVEPKSCDKTHTCPPCPAPELLGGPSVFLFPPKPKD | |
| | TLMISRTPEVTCVVVDVSHEDPEVKFNWYVDGVEVHNAKTKPREEQYGSTY | |
| | RVVSVLTVLHQDWLNGKEYKCKVSNKALPAPIEKTISKAKGQPREPQVYTL | |
| | PPSRDELTKNQVSLWCLVKGFYPSDIAVEWESNGQPENNYKTTPPVLDSDG | |
| | SFFLYSKLTVDKSRWQQGNVFSCSVMHEALHNHYTQKSLSLSPG | |
| MAb2.3-HC | ELQLQESGPGLVKPSETLSLTCTVSGGSISTSSDYWGWIRQPPGKGLEWIG | 214 |
| (hole) | SIYYTGNTYYLPSLKSRVTISVDTSKNQFSLKLSSVTAADTAVYYCSRVRY | |
| | GVGVPRYFDPWGQGTLVTVSSASTKGPSVFPLAPSSKSTSGGTAALGCLVK | |
| | DYFPEPVTVSWNSGALTSGVHTFPAVLQSSGLYSLSSVVTVPSSSLGTQTY | |
| | ICNVNHKPSNTKVDKKVEPKSCDKTHTCPPCPAPELLGGPSVFLFPPKPKD | |
| | TLMISRTPEVTCVVVDVSHEDPEVKFNWYVDGVEVHNAKTKPREEQYGSTY | |
| | RVVSVLTVLHQDWLNGKEYKCKVSNKALPAPIEKTISKAKGQPREPQVYTL | |
| | PPSRDELTKNQVSLSCAVKGFYPSDIAVEWESNGQPENNYKTTPPVLDSDG | |
| | SFFLVSKLTVDKSRWQQGNVFSCSVMHEALHNHYTQKSLSLSPG | |
| MAb2.4-HC | ELQLQESGPGLVKPSETLSLTCTVSGGSISNSSYYWGWIRQPPGKGLEWIG | 215 |
| | SIYYTGNTYYLPSLKSRVTISVDTSKNQFSLKLSSVTAADTAVYYCARVRY | |
| | GVGVPRYFDPWGQGTLVTVSSASTKGPSVFPLAPSSKSTSGGTAALGCLVK | |
| | DYFPEPVTVSWNSGALTSGVHTFPAVLQSSGLYSLSSVVTVPSSSLGTQTY | |
| | ICNVNHKPSNTKVDKKVEPKSCDKTHTCPPCPAPELLGGPSVFLFPPKPKD | |
| | TLMISRTPEVTCVVVDVSHEDPEVKFNWYVDGVEVHNAKTKPREEQYGSTY | |
| | RVVSVLTVLHQDWLNGKEYKCKVSNKALPAPIEKTISKAKGQPREPQVYTL | |
| | PPSRDELTKNQVSLTCLVKGFYPSDIAVEWESNGQPENNYKTTPPVLDSDG | |
| | SFFLYSKLTVDKSRWQQGNVFSCSVMHEALHNHYTQKSLSLSPG | |
| MAb2.4-HC | ELQLQESGPGLVKPSETLSLTCTVSGGSISNSSYYWGWIRQPPGKGLEWIG | 216 |
| (knob) | SIYYTGNTYYLPSLKSRVTISVDTSKNQFSLKLSSVTAADTAVYYCARVRY | |
| | GVGVPRYFDPWGQGTLVTVSSASTKGPSVFPLAPSSKSTSGGTAALGCLVK | |
| | DYFPEPVTVSWNSGALTSGVHTFPAVLQSSGLYSLSSVVTVPSSSLGTQTY | |
| | ICNVNHKPSNTKVDKKVEPKSCDKTHTCPPCPAPELLGGPSVFLFPPKPKD | |
| | TLMISRTPEVTCVVVDVSHEDPEVKFNWYVDGVEVHNAKTKPREEQYGSTY | |
| | RVVSVLTVLHQDWLNGKEYKCKVSNKALPAPIEKTISKAKGQPREPQVYTL | |
| | PPSRDELTKNQVSLWCLVKGFYPSDIAVEWESNGQPENNYKTTPPVLDSDG | |
| | SFFLYSKLTVDKSRWQQGNVFSCSVMHEALHNHYTQKSLSLSPG | |
| MAb2.4-HC | ELQLQESGPGLVKPSETLSLTCTVSGGSISNSSYYWGWIRQPPGKGLEWIG | 217 |
| (hole) | SIYYTGNTYYLPSLKSRVTISVDTSKNQFSLKLSSVTAADTAVYYCARVRY | |
| | GVGVPRYFDPWGQGTLVTVSSASTKGPSVFPLAPSSKSTSGGTAALGCLVK | |
| | DYFPEPVTVSWNSGALTSGVHTFPAVLQSSGLYSLSSVVTVPSSSLGTQTY | |
| | ICNVNHKPSNTKVDKKVEPKSCDKTHTCPPCPAPELLGGPSVFLFPPKPKD | |
| | TLMISRTPEVTCVVVDVSHEDPEVKFNWYVDGVEVHNAKTKPREEQYGSTY | |
| | RVVSVLTVLHQDWLNGKEYKCKVSNKALPAPIEKTISKAKGQPREPQVYTL | |
| | PPSRDELTKNQVSLSCAVKGFYPSDIAVEWESNGQPENNYKTTPPVLDSDG | |
| | SFFLVSKLTVDKSRWQQGNVFSCSVMHEALHNHYTQKSLSLSPG | |
| MAb2.5-HC | ELQLQESGPGLVKPSETLSLTCTVSGGSISESSYYWGWIRQPPGKGLEWIG | 218 |
| | SIYYTGNTYYLPSLKSRVTISVDTSKNQFSLKLSSVTAADTAVYYCARVRY | |
| | GVGVPRYFDPWGQGTLVTVSSASTKGPSVFPLAPSSKSTSGGTAALGCLVK | |
| | DYFPEPVTVSWNSGALTSGVHTFPAVLQSSGLYSLSSVVTVPSSSLGTQTY | |
| | ICNVNHKPSNTKVDKKVEPKSCDKTHTCPPCPAPELLGGPSVFLFPPKPKD | |
| | TLMISRTPEVTCVVVDVSHEDPEVKFNWYVDGVEVHNAKTKPREEQYGSTY | |
| | RVVSVLTVLHQDWLNGKEYKCKVSNKALPAPIEKTISKAKGQPREPQVYTL | |
| | PPSRDELTKNQVSLTCLVKGFYPSDIAVEWESNGQPENNYKTTPPVLDSDG | |
| | SFFLYSKLTVDKSRWQQGNVFSCSVMHEALHNHYTQKSLSLSPG | |
| MAb2.5-HC | ELQLQESGPGLVKPSETLSLTCTVSGGSISESSYYWGWIRQPPGKGLEWIG | 219 |
| (knob) | SIYYTGNTYYLPSLKSRVTISVDTSKNQFSLKLSSVTAADTAVYYCARVRY | |
| | GVGVPRYFDPWGQGTLVTVSSASTKGPSVFPLAPSSKSTSGGTAALGCLVK | |
| | DYFPEPVTVSWNSGALTSGVHTFPAVLQSSGLYSLSSVVTVPSSSLGTQTY | |
| | ICNVNHKPSNTKVDKKVEPKSCDKTHTCPPCPAPELLGGPSVFLFPPKPKD | |
| | TLMISRTPEVTCVVVDVSHEDPEVKFNWYVDGVEVHNAKTKPREEQYGSTY | |
| | RVVSVLTVLHQDWLNGKEYKCKVSNKALPAPIEKTISKAKGQPREPQVYTL | |
| | PPSRDELTKNQVSLWCLVKGFYPSDIAVEWESNGQPENNYKTTPPVLDSDG | |
| | SFFLYSKLTVDKSRWQQGNVFSCSVMHEALHNHYTQKSLSLSPG | |
| MAb2.5-HC | ELQLQESGPGLVKPSETLSLTCTVSGGSISESSYYWGWIRQPPGKGLEWIG | 220 |
| (hole) | SIYYTGNTYYLPSLKSRVTISVDTSKNQFSLKLSSVTAADTAVYYCARVRY | |
| | GVGVPRYFDPWGQGTLVTVSSASTKGPSVFPLAPSSKSTSGGTAALGCLVK | |
| | DYFPEPVTVSWNSGALTSGVHTFPAVLQSSGLYSLSSVVTVPSSSLGTQTY | |
| | ICNVNHKPSNTKVDKKVEPKSCDKTHTCPPCPAPELLGGPSVFLFPPKPKD | |
| | TLMISRTPEVTCVVVDVSHEDPEVKFNWYVDGVEVHNAKTKPREEQYGSTY | |
| | RVVSVLTVLHQDWLNGKEYKCKVSNKALPAPIEKTISKAKGQPREPQVYTL | |
| | PPSRDELTKNQVSLSCAVKGFYPSDIAVEWESNGQPENNYKTTPPVLDSDG | |
| | SFFLVSKLTVDKSRWQQGNVFSCSVMHEALHNHYTQKSLSLSPG | |
| MAb2.6-HC | ELQLQESGPGLVKPSETLSLTCTVSGGSISTSSYHWGWIRQPPGKGLEWIG | 221 |
| | SIYYTGNTYYMPSLKSRVTISVDTSKNQFSLKLSSVTAADTAVYYCVRVRY | |
| | GVGVPRYFDPWGQGTLVTVSSASTKGPSVFPLAPSSKSTSGGTAALGCLVK | |
| | DYFPEPVTVSWNSGALTSGVHTFPAVLQSSGLYSLSSVVTVPSSSLGTQTY | |
| | ICNVNHKPSNTKVDKKVEPKSCDKTHTCPPCPAPELLGGPSVFLFPPKPKD | |
| | TLMISRTPEVTCVVVDVSHEDPEVKFNWYVDGVEVHNAKTKPREEQYGSTY | |
| | RVVSVLTVLHQDWLNGKEYKCKVSNKALPAPIEKTISKAKGQPREPQVYTL | |
| | PPSRDELTKNQVSLTCLVKGFYPSDIAVEWESNGQPENNYKTTPPVLDSDG | |
| | SFFLYSKLTVDKSRWQQGNVFSCSVMHEALHNHYTQKSLSLSPG | |
| MAb2.6-HC | ELQLQESGPGLVKPSETLSLTCTVSGGSISTSSYHWGWIRQPPGKGLEWIG | 222 |
| (knob) | SIYYTGNTYYMPSLKSRVTISVDTSKNQFSLKLSSVTAADTAVYYCVRVRY | |
| | GVGVPRYFDPWGQGTLVTVSSASTKGPSVFPLAPSSKSTSGGTAALGCLVK | |
| | DYFPEPVTVSWNSGALTSGVHTFPAVLQSSGLYSLSSVVTVPSSSLGTQTY | |
| | ICNVNHKPSNTKVDKKVEPKSCDKTHTCPPCPAPELLGGPSVFLFPPKPKD | |
| | TLMISRTPEVTCVVVDVSHEDPEVKFNWYVDGVEVHNAKTKPREEQYGSTY | |
| | RVVSVLTVLHQDWLNGKEYKCKVSNKALPAPIEKTISKAKGQPREPQVYTL | |
| | PPSRDELTKNQVSLWCLVKGFYPSDIAVEWESNGQPENNYKTTPPVLDSDG | |
| | SFFLYSKLTVDKSRWQQGNVFSCSVMHEALHNHYTQKSLSLSPG | |
| MAb2.6-HC | ELQLQESGPGLVKPSETLSLTCTVSGGSISTSSYHWGWIRQPPGKGLEWIG | 223 |
| (hole) | SIYYTGNTYYMPSLKSRVTISVDTSKNQFSLKLSSVTAADTAVYYCVRVRY | |
| | GVGVPRYFDPWGQGTLVTVSSASTKGPSVFPLAPSSKSTSGGTAALGCLVK | |
| | DYFPEPVTVSWNSGALTSGVHTFPAVLQSSGLYSLSSVVTVPSSSLGTQTY | |
| | ICNVNHKPSNTKVDKKVEPKSCDKTHTCPPCPAPELLGGPSVFLFPPKPKD | |
| | TLMISRTPEVTCVVVDVSHEDPEVKFNWYVDGVEVHNAKTKPREEQYGSTY | |
| | RVVSVLTVLHQDWLNGKEYKCKVSNKALPAPIEKTISKAKGQPREPQVYTL | |
| | PPSRDELTKNQVSLSCAVKGFYPSDIAVEWESNGQPENNYKTTPPVLDSDG | |
| | SFFLVSKLTVDKSRWQQGNVFSCSVMHEALHNHYTQKSLSLSPG | |
| MAb2.7-HC | ELQLQESGPGLVKPSETLSLTCTVSGGSISRSSYYWGWIRQPPGKGLEWIG | 224 |
| | SIYYTGNTYYWPSLKSRVTISVDTSKNQFSLKLSSVTAADTAVYYCTRVRY | |
| | GVGVPRYFDPWGQGTLVTVSSASTKGPSVFPLAPSSKSTSGGTAALGCLVK | |
| | DYFPEPVTVSWNSGALTSGVHTFPAVLQSSGLYSLSSVVTVPSSSLGTQTY | |
| | ICNVNHKPSNTKVDKKVEPKSCDKTHTCPPCPAPELLGGPSVFLFPPKPKD | |
| | TLMISRTPEVTCVVVDVSHEDPEVKFNWYVDGVEVHNAKTKPREEQYGSTY | |
| | RVVSVLTVLHQDWLNGKEYKCKVSNKALPAPIEKTISKAKGQPREPQVYTL | |
| | PPSRDELTKNQVSLTCLVKGFYPSDIAVEWESNGQPENNYKTTPPVLDSDG | |
| | SFFLYSKLTVDKSRWQQGNVFSCSVMHEALHNHYTQKSLSLSPG | |
| MAb2.7-HC | ELQLQESGPGLVKPSETLSLTCTVSGGSISRSSYYWGWIRQPPGKGLEWIG | 225 |
| (knob) | SIYYTGNTYYWPSLKSRVTISVDTSKNQFSLKLSSVTAADTAVYYCTRVRY | |
| | GVGVPRYFDPWGQGTLVTVSSASTKGPSVFPLAPSSKSTSGGTAALGCLVK | |
| | DYFPEPVTVSWNSGALTSGVHTFPAVLQSSGLYSLSSVVTVPSSSLGTQTY | |
| | ICNVNHKPSNTKVDKKVEPKSCDKTHTCPPCPAPELLGGPSVFLFPPKPKD | |
| | TLMISRTPEVTCVVVDVSHEDPEVKFNWYVDGVEVHNAKTKPREEQYGSTY | |
| | RVVSVLTVLHQDWLNGKEYKCKVSNKALPAPIEKTISKAKGQPREPQVYTL | |
| | PPSRDELTKNQVSLWCLVKGFYPSDIAVEWESNGQPENNYKTTPPVLDSDG | |
| | SFFLYSKLTVDKSRWQQGNVFSCSVMHEALHNHYTQKSLSLSPG | |
| MAb2.7-HC | ELQLQESGPGLVKPSETLSLTCTVSGGSISRSSYYWGWIRQPPGKGLEWIG | 226 |
| (hole) | SIYYTGNTYYWPSLKSRVTISVDTSKNQFSLKLSSVTAADTAVYYCTRVRY | |
| | GVGVPRYFDPWGQGTLVTVSSASTKGPSVFPLAPSSKSTSGGTAALGCLVK | |
| | DYFPEPVTVSWNSGALTSGVHTFPAVLQSSGLYSLSSVVTVPSSSLGTQTY | |
| | ICNVNHKPSNTKVDKKVEPKSCDKTHTCPPCPAPELLGGPSVFLFPPKPKD | |
| | TLMISRTPEVTCVVVDVSHEDPEVKFNWYVDGVEVHNAKTKPREEQYGSTY | |
| | RVVSVLTVLHQDWLNGKEYKCKVSNKALPAPIEKTISKAKGQPREPQVYTL | |
| | PPSRDELTKNQVSLSCAVKGFYPSDIAVEWESNGQPENNYKTTPPVLDSDG | |
| | SFFLVSKLTVDKSRWQQGNVFSCSVMHEALHNHYTQKSLSLSPG | |
| MAb2.8-HC | ELQLQESGPGLVKPSETLSLTCTVSGGSISDSSYYWGWIRQPPGKGLEWIG | 227 |
| | SIYYTGETYYAPSLKSRVTISVDTSKNQFSLKLSSVTAADTAVYYCARLRY | |
| | GVGVPRYFDPWGQGTLVTVSSASTKGPSVFPLAPSSKSTSGGTAALGCLVK | |
| | DYFPEPVTVSWNSGALTSGVHTFPAVLQSSGLYSLSSVVTVPSSSLGTQTY | |
| | ICNVNHKPSNTKVDKKVEPKSCDKTHTCPPCPAPELLGGPSVFLFPPKPKD | |
| | TLMISRTPEVTCVVVDVSHEDPEVKFNWYVDGVEVHNAKTKPREEQYGSTY | |
| | RVVSVLTVLHQDWLNGKEYKCKVSNKALPAPIEKTISKAKGQPREPQVYTL | |
| | PPSRDELTKNQVSLTCLVKGFYPSDIAVEWESNGQPENNYKTTPPVLDSDG | |
| | SFFLYSKLTVDKSRWQQGNVFSCSVMHEALHNHYTQKSLSLSPG | |
| MAb2.8-HC | ELQLQESGPGLVKPSETLSLTCTVSGGSISDSSYYWGWIRQPPGKGLEWIG | 228 |
| (knob) | SIYYTGETYYAPSLKSRVTISVDTSKNQFSLKLSSVTAADTAVYYCARLRY | |
| | GVGVPRYFDPWGQGTLVTVSSASTKGPSVFPLAPSSKSTSGGTAALGCLVK | |
| | DYFPEPVTVSWNSGALTSGVHTFPAVLQSSGLYSLSSVVTVPSSSLGTQTY | |
| | ICNVNHKPSNTKVDKKVEPKSCDKTHTCPPCPAPELLGGPSVFLFPPKPKD | |
| | TLMISRTPEVTCVVVDVSHEDPEVKFNWYVDGVEVHNAKTKPREEQYGSTY | |
| | RVVSVLTVLHQDWLNGKEYKCKVSNKALPAPIEKTISKAKGQPREPQVYTL | |
| | PPSRDELTKNQVSLWCLVKGFYPSDIAVEWESNGQPENNYKTTPPVLDSDG | |
| | SFFLYSKLTVDKSRWQQGNVFSCSVMHEALHNHYTQKSLSLSPG | |
| MAb2.8-HC | ELQLQESGPGLVKPSETLSLTCTVSGGSISDSSYYWGWIRQPPGKGLEWIG | 229 |
| (hole) | SIYYTGETYYAPSLKSRVTISVDTSKNQFSLKLSSVTAADTAVYYCARLRY | |
| | GVGVPRYFDPWGQGTLVTVSSASTKGPSVFPLAPSSKSTSGGTAALGCLVK | |
| | DYFPEPVTVSWNSGALTSGVHTFPAVLQSSGLYSLSSVVTVPSSSLGTQTY | |
| | ICNVNHKPSNTKVDKKVEPKSCDKTHTCPPCPAPELLGGPSVFLFPPKPKD | |
| | TLMISRTPEVTCVVVDVSHEDPEVKFNWYVDGVEVHNAKTKPREEQYGSTY | |
| | RVVSVLTVLHQDWLNGKEYKCKVSNKALPAPIEKTISKAKGQPREPQVYTL | |
| | PPSRDELTKNQVSLSCAVKGFYPSDIAVEWESNGQPENNYKTTPPVLDSDG | |
| | SFFLVSKLTVDKSRWQQGNVFSCSVMHEALHNHYTQKSLSLSPG | |
| MAb2.9-HC | ELQLQESGPGLVKPSETLSLTCTVSGGSISDSSYYWGWIRQPPGKGLEWIG | 230 |
| | SIYYTGETYYAPSLKSRVTISVDTSKNQFSLKLSSVTAADTAVYYCARVKY | |
| | GVGVPRYFDPWGQGTLVTVSSASTKGPSVFPLAPSSKSTSGGTAALGCLVK | |
| | DYFPEPVTVSWNSGALTSGVHTFPAVLQSSGLYSLSSVVTVPSSSLGTQTY | |
| | ICNVNHKPSNTKVDKKVEPKSCDKTHTCPPCPAPELLGGPSVFLFPPKPKD | |
| | TLMISRTPEVTCVVVDVSHEDPEVKFNWYVDGVEVHNAKTKPREEQYGSTY | |
| | RVVSVLTVLHQDWLNGKEYKCKVSNKALPAPIEKTISKAKGQPREPQVYTL | |
| | PPSRDELTKNQVSLTCLVKGFYPSDIAVEWESNGQPENNYKTTPPVLDSDG | |
| | SFFLYSKLTVDKSRWQQGNVFSCSVMHEALHNHYTQKSLSLSPG | |
| MAb2.9-HC | ELQLQESGPGLVKPSETLSLTCTVSGGSISDSSYYWGWIRQPPGKGLEWIG | 231 |
| (knob) | SIYYTGETYYAPSLKSRVTISVDTSKNQFSLKLSSVTAADTAVYYCARVKY | |
| | GVGVPRYFDPWGQGTLVTVSSASTKGPSVFPLAPSSKSTSGGTAALGCLVK | |
| | DYFPEPVTVSWNSGALTSGVHTFPAVLQSSGLYSLSSVVTVPSSSLGTQTY | |
| | ICNVNHKPSNTKVDKKVEPKSCDKTHTCPPCPAPELLGGPSVFLFPPKPKD | |
| | TLMISRTPEVTCVVVDVSHEDPEVKFNWYVDGVEVHNAKTKPREEQYGSTY | |
| | RVVSVLTVLHQDWLNGKEYKCKVSNKALPAPIEKTISKAKGQPREPQVYTL | |
| | PPSRDELTKNQVSLWCLVKGFYPSDIAVEWESNGQPENNYKTTPPVLDSDG | |
| | SFFLYSKLTVDKSRWQQGNVFSCSVMHEALHNHYTQKSLSLSPG | |
| MAb2.9-HC | ELQLQESGPGLVKPSETLSLTCTVSGGSISDSSYYWGWIRQPPGKGLEWIG | 232 |
| (hole) | SIYYTGETYYAPSLKSRVTISVDTSKNQFSLKLSSVTAADTAVYYCARVKY | |
| | GVGVPRYFDPWGQGTLVTVSSASTKGPSVFPLAPSSKSTSGGTAALGCLVK | |
| | DYFPEPVTVSWNSGALTSGVHTFPAVLQSSGLYSLSSVVTVPSSSLGTQTY | |
| | ICNVNHKPSNTKVDKKVEPKSCDKTHTCPPCPAPELLGGPSVFLFPPKPKD | |
| | TLMISRTPEVTCVVVDVSHEDPEVKFNWYVDGVEVHNAKTKPREEQYGSTY | |
| | RVVSVLTVLHQDWLNGKEYKCKVSNKALPAPIEKTISKAKGQPREPQVYTL | |
| | PPSRDELTKNQVSLSCAVKGFYPSDIAVEWESNGQPENNYKTTPPVLDSDG | |
| | SFFLVSKLTVDKSRWQQGNVFSCSVMHEALHNHYTQKSLSLSPG | |
| MAb2.10-HC | ELQLQESGPGLVKPSETLSLTCTVSGGSISDSSYYWGWIRQPPGKGLEWIG | 233 |
| | SIYYTGETYYAPSLKSRVTISVDTSKNQFSLKLSSVTAADTAVYYCARVRY | |
| | GVGVPRHFDPWGQGTLVTVSSASTKGPSVFPLAPSSKSTSGGTAALGCLVK | |
| | DYFPEPVTVSWNSGALTSGVHTFPAVLQSSGLYSLSSVVTVPSSSLGTQTY | |
| | ICNVNHKPSNTKVDKKVEPKSCDKTHTCPPCPAPELLGGPSVFLFPPKPKD | |
| | TLMISRTPEVTCVVVDVSHEDPEVKFNWYVDGVEVHNAKTKPREEQYGSTY | |
| | RVVSVLTVLHQDWLNGKEYKCKVSNKALPAPIEKTISKAKGQPREPQVYTL | |
| | PPSRDELTKNQVSLTCLVKGFYPSDIAVEWESNGQPENNYKTTPPVLDSDG | |
| | SFFLYSKLTVDKSRWQQGNVFSCSVMHEALHNHYTQKSLSLSPG | |
| MAb2.10-HC | ELQLQESGPGLVKPSETLSLTCTVSGGSISDSSYYWGWIRQPPGKGLEWIG | 234 |
| (knob) | SIYYTGETYYAPSLKSRVTISVDTSKNQFSLKLSSVTAADTAVYYCARVRY | |
| | GVGVPRHFDPWGQGTLVTVSSASTKGPSVFPLAPSSKSTSGGTAALGCLVK | |
| | DYFPEPVTVSWNSGALTSGVHTFPAVLQSSGLYSLSSVVTVPSSSLGTQTY | |
| | ICNVNHKPSNTKVDKKVEPKSCDKTHTCPPCPAPELLGGPSVFLFPPKPKD | |
| | TLMISRTPEVTCVVVDVSHEDPEVKFNWYVDGVEVHNAKTKPREEQYGSTY | |
| | RVVSVLTVLHQDWLNGKEYKCKVSNKALPAPIEKTISKAKGQPREPQVYTL | |
| | PPSRDELTKNQVSLWCLVKGFYPSDIAVEWESNGQPENNYKTTPPVLDSDG | |
| | SFFLYSKLTVDKSRWQQGNVFSCSVMHEALHNHYTQKSLSLSPG | |
| MAb2.10-HC | ELQLQESGPGLVKPSETLSLTCTVSGGSISDSSYYWGWIRQPPGKGLEWIG | 235 |
| (hole) | SIYYTGETYYAPSLKSRVTISVDTSKNQFSLKLSSVTAADTAVYYCARVRY | |
| | GVGVPRHFDPWGQGTLVTVSSASTKGPSVFPLAPSSKSTSGGTAALGCLVK | |
| | DYFPEPVTVSWNSGALTSGVHTFPAVLQSSGLYSLSSVVTVPSSSLGTQTY | |
| | ICNVNHKPSNTKVDKKVEPKSCDKTHTCPPCPAPELLGGPSVFLFPPKPKD | |
| | TLMISRTPEVTCVVVDVSHEDPEVKFNWYVDGVEVHNAKTKPREEQYGSTY | |
| | RVVSVLTVLHQDWLNGKEYKCKVSNKALPAPIEKTISKAKGQPREPQVYTL | |
| | PPSRDELTKNQVSLSCAVKGFYPSDIAVEWESNGQPENNYKTTPPVLDSDG | |
| | SFFLVSKLTVDKSRWQQGNVFSCSVMHEALHNHYTQKSLSLSPG | |
| MAb2.11-HC | ELQLQESGPGLVKPSETLSLTCTVSGGSISESSYYWGWIRQPPGKGLEWIG | 236 |
| | SIYYTGETYYAPSLKSRVTISVDTSKNQFSLKLSSVTAADTAVYYCARLRY | |
| | GVGVPRYFDPWGQGTLVTVSSASTKGPSVFPLAPSSKSTSGGTAALGCLVK | |
| | DYFPEPVTVSWNSGALTSGVHTFPAVLQSSGLYSLSSVVTVPSSSLGTQTY | |
| | ICNVNHKPSNTKVDKKVEPKSCDKTHTCPPCPAPELLGGPSVFLFPPKPKD | |
| | TLMISRTPEVTCVVVDVSHEDPEVKFNWYVDGVEVHNAKTKPREEQYGSTY | |
| | RVVSVLTVLHQDWLNGKEYKCKVSNKALPAPIEKTISKAKGQPREPQVYTL | |
| | PPSRDELTKNQVSLTCLVKGFYPSDIAVEWESNGQPENNYKTTPPVLDSDG | |
| | SFFLYSKLTVDKSRWQQGNVFSCSVMHEALHNHYTQKSLSLSPG | |
| MAb2.11-HC | ELQLQESGPGLVKPSETLSLTCTVSGGSISESSYYWGWIRQPPGKGLEWIG | 237 |
| (knob) | SIYYTGETYYAPSLKSRVTISVDTSKNQFSLKLSSVTAADTAVYYCARLRY | |
| | GVGVPRYFDPWGQGTLVTVSSASTKGPSVFPLAPSSKSTSGGTAALGCLVK | |
| | DYFPEPVTVSWNSGALTSGVHTFPAVLQSSGLYSLSSVVTVPSSSLGTQTY | |
| | ICNVNHKPSNTKVDKKVEPKSCDKTHTCPPCPAPELLGGPSVFLFPPKPKD | |
| | TLMISRTPEVTCVVVDVSHEDPEVKFNWYVDGVEVHNAKTKPREEQYGSTY | |
| | RVVSVLTVLHQDWLNGKEYKCKVSNKALPAPIEKTISKAKGQPREPQVYTL | |
| | PPSRDELTKNQVSLWCLVKGFYPSDIAVEWESNGQPENNYKTTPPVLDSDG | |
| | SFFLYSKLTVDKSRWQQGNVFSCSVMHEALHNHYTQKSLSLSPG | |
| MAb2.11-HC | ELQLQESGPGLVKPSETLSLTCTVSGGSISESSYYWGWIRQPPGKGLEWIG | 238 |
| (hole) | SIYYTGETYYAPSLKSRVTISVDTSKNQFSLKLSSVTAADTAVYYCARLRY | |
| | GVGVPRYFDPWGQGTLVTVSSASTKGPSVFPLAPSSKSTSGGTAALGCLVK | |
| | DYFPEPVTVSWNSGALTSGVHTFPAVLQSSGLYSLSSVVTVPSSSLGTQTY | |
| | ICNVNHKPSNTKVDKKVEPKSCDKTHTCPPCPAPELLGGPSVFLFPPKPKD | |
| | TLMISRTPEVTCVVVDVSHEDPEVKFNWYVDGVEVHNAKTKPREEQYGSTY | |
| | RVVSVLTVLHQDWLNGKEYKCKVSNKALPAPIEKTISKAKGQPREPQVYTL | |
| | PPSRDELTKNQVSLSCAVKGFYPSDIAVEWESNGQPENNYKTTPPVLDSDG | |
| | SFFLVSKLTVDKSRWQQGNVFSCSVMHEALHNHYTQKSLSLSPG | |
| MAb2.12-HC | ELQLQESGPGLVKPSETLSLTCTVSGGSISESSYYWGWIRQPPGKGLEWIG | 239 |
| | SIYYTGETYYAPSLKSRVTISVDTSKNQFSLKLSSVTAADTAVYYCARVKY | |
| | GVGVPRYFDPWGQGTLVTVSSASTKGPSVFPLAPSSKSTSGGTAALGCLVK | |
| | DYFPEPVTVSWNSGALTSGVHTFPAVLQSSGLYSLSSVVTVPSSSLGTQTY | |
| | ICNVNHKPSNTKVDKKVEPKSCDKTHTCPPCPAPELLGGPSVFLFPPKPKD | |
| | TLMISRTPEVTCVVVDVSHEDPEVKFNWYVDGVEVHNAKTKPREEQYGSTY | |
| | RVVSVLTVLHQDWLNGKEYKCKVSNKALPAPIEKTISKAKGQPREPQVYTL | |
| | PPSRDELTKNQVSLTCLVKGFYPSDIAVEWESNGQPENNYKTTPPVLDSDG | |
| | SFFLYSKLTVDKSRWQQGNVFSCSVMHEALHNHYTQKSLSLSPG | |
| mAb2.12-HC | ELQLQESGPGLVKPSETLSLTCTVSGGSISESSYYWGWIRQPPGKGLEWIG | 240 |
| (knob) | SIYYTGETYYAPSLKSRVTISVDTSKNQFSLKLSSVTAADTAVYYCARVKY | |
| | GVGVPRYFDPWGQGTLVTVSSASTKGPSVFPLAPSSKSTSGGTAALGCLVK | |
| | DYFPEPVTVSWNSGALTSGVHTFPAVLQSSGLYSLSSVVTVPSSSLGTQTY | |
| | ICNVNHKPSNTKVDKKVEPKSCDKTHTCPPCPAPELLGGPSVFLFPPKPKD | |
| | TLMISRTPEVTCVVVDVSHEDPEVKFNWYVDGVEVHNAKTKPREEQYGSTY | |
| | RVVSVLTVLHQDWLNGKEYKCKVSNKALPAPIEKTISKAKGQPREPQVYTL | |
| | PPSRDELTKNQVSLWCLVKGFYPSDIAVEWESNGQPENNYKTTPPVLDSDG | |
| | SFFLYSKLTVDKSRWQQGNVFSCSVMHEALHNHYTQKSLSLSPG | |
| MAb2.12-HC | ELQLQESGPGLVKPSETLSLTCTVSGGSISESSYYWGWIRQPPGKGLEWIG | 241 |
| (hole) | SIYYTGETYYAPSLKSRVTISVDTSKNQFSLKLSSVTAADTAVYYCARVKY | |
| | GVGVPRYFDPWGQGTLVTVSSASTKGPSVFPLAPSSKSTSGGTAALGCLVK | |
| | DYFPEPVTVSWNSGALTSGVHTFPAVLQSSGLYSLSSVVTVPSSSLGTQTY | |
| | ICNVNHKPSNTKVDKKVEPKSCDKTHTCPPCPAPELLGGPSVFLFPPKPKD | |
| | TLMISRTPEVTCVVVDVSHEDPEVKFNWYVDGVEVHNAKTKPREEQYGSTY | |
| | RVVSVLTVLHQDWLNGKEYKCKVSNKALPAPIEKTISKAKGQPREPQVYTL | |
| | PPSRDELTKNQVSLSCAVKGFYPSDIAVEWESNGQPENNYKTTPPVLDSDG | |
| | SFFLVSKLTVDKSRWQQGNVFSCSVMHEALHNHYTQKSLSLSPG | |
| mAb6_2-HVR-H1- | XXXNXYX | 251 |
| generic | X at position 1 is T, D, E, or N; X at | |
| | position 2 is S, A, E, G, K, Q, R, or T; | |
| | X at position 3 is S, A, D, E, G, N, P, | |
| | Q, or T; X at position 5 is Y, A, E, G, | |
| | H, M, N, Q, S, T, or V; X at position 7 | |
| | is W, F, I, V, or Y. | |
| mAb6_2-HVR-H1- | DSSNYYW | 252 |
| T30D | | |
| mAb6_2-HVR-H1- | ESSNYYW | 253 |
| T30E | | |
| mAb6_2-HVR-H1- | NSSNYYW | 254 |
| T30N | | |
| mAb6_2-HVR-H1- | TASNYYW | 255 |
| S31A | | |
| mAb6_2-HVR-H1- | TESNYYW | 256 |
| S31E | | |
| mAb6_2-HVR-H1- | TGSNYYW | 257 |
| S31G | | |
| mAb6_2-HVR-H1- | TKSNYYW | 258 |
| S31K | | |
| mAb6_2-HVR-H1- | TQSNYYW | 259 |
| S31Q | | |
| mAb6_2-HVR-H1- | TRSNYYW | 260 |
| S31R | | |
| mAb6_2-HVR-H1- | TTSNYYW | 261 |
| S31T | | |
| mAb6_2-HVR-H1- | TSANYYW | 262 |
| S32A | | |
| mAb6_2-HVR-H1- | TSDNYYW | 263 |
| S32D | | |
| mAb6_2-HVR-H1- | TSENYYW | 264 |
| S32E | | |
| mAb6_2-HVR-H1- | TSGNYYW | 265 |
| S32G | | |
| mAb6_2-HVR-H1- | TSNNYYW | 266 |
| S32N | | |
| mAb6_2-HVR-H1- | TSPNYYW | 267 |
| S32P | | |
| mAb6_2-HVR-H1- | TSQNYYW | 268 |
| S32Q | | |
| mAb6_2-HVR-H1- | TSTNYYW | 269 |
| S32T | | |
| mAb6_2-HVR-H1- | TSSNAYW | 270 |
| Y34A | | |
| mAb6_2-HVR-H1- | TSSNEYW | 271 |
| Y34E | | |
| mAb6_2-HVR-H1- | TSSNGYW | 272 |
| Y34G | | |
| mAb6_2-HVR-H1- | TSSNHYW | 273 |
| Y34H | | |
| mAb6_2-HVR-H1- | TSSNMYW | 274 |
| Y34M | | |
| mAb6_2-HVR-H1- | TSSNNYW | 275 |
| Y34N | | |
| mAb6_2-HVR-H1- | TSSNQYW | 276 |
| Y34Q | | |
| mAb6_2-HVR-H1- | TSSNSYW | 277 |
| Y34S | | |
| mAb6_2-HVR-H1- | TSSNTYW | 278 |
| Y34T | | |
| mAb6_2-HVR-H1- | TSSNVYW | 279 |
| Y34V | | |
| mAb6_2-HVR-H1- | TSSNYYF | 280 |
| W35aF | | |
| mAb6_2-HVR-H1- | TSSNYYI | 281 |
| W35aI | | |
| mAb6_2-HVR-H1- | TSSNYYV | 282 |
| W35aV | | |
| mAb6_2-HVR-H1- | TSSNYYY | 283 |
| W35aY | | |
| mAb6_2-HVR-H2- | XXDXXXXXXYXX | 284 |
| generic | X at position 1 is S, N, or T; X at | |
| | position 2 is I, M, or V; X at position | |
| | 4 is Y, or H; X at position 5 is T, H, | |
| | L, or N; X at position 6 is G, A, D, E, | |
| | H, K, N, Q, R, S, or T; X at position 7 | |
| | is S, A, D, Q, or T; X at position 8 is | |
| | T, A, D, or E; X at position 9 is Y, A, | |
| | F, Q, S, or W; X at position 11 is N, D, | |
| | E, H, P, or Q; X at position 12 is P, A, | |
| | or E. | |
| mAb6_2-HVR-H2- | NIDYTGSTYYNP | 285 |
| S50N | | |
| mAb6_2-HVR-H2- | TIDYTGSTYYNP | 286 |
| S50T | | |
| mAb6_2-HVR-H2- | SMDYTGSTYYNP | 287 |
| I51M | | |
| mAb6_2-HVR-H2- | SVDYTGSTYYNP | 288 |
| I51V | | |
| mAb6_2-HVR-H2- | SIDHTGSTYYNP | 289 |
| Y53H | | |
| mAb6_2-HVR-H2- | SIDYHGSTYYNP | 290 |
| T54H | | |
| mAb6_2-HVR-H2- | SIDYLGSTYYNP | 291 |
| T54L | | |
| mAb6_2-HVR-H2- | SIDYNGSTYYNP | 292 |
| T54N | | |
| mAb6_2-HVR-H2- | SIDYTASTYYNP | 293 |
| G55A | | |
| mAb6_2-HVR-H2- | SIDYTDSTYYNP | 294 |
| G55D | | |
| mAb6_2-HVR-H2- | SIDYTESTYYNP | 295 |
| G55E | | |
| mAb6_2-HVR-H2- | SIDYTHSTYYNP | 296 |
| G55H | | |
| mAb6_2-HVR-H2- | SIDYTKSTYYNP | 297 |
| G55K | | |
| mAb6_2-HVR-H2- | SIDYTNSTYYNP | 298 |
| G55N | | |
| mAb6_2-HVR-H2- | SIDYTQSTYYNP | 299 |
| G55Q | | |
| mAb6_2-HVR-H2- | SIDYTRSTYYNP | 300 |
| G55R | | |
| mAb6_2-HVR-H2- | SIDYTSSTYYNP | 301 |
| G55S | | |
| mAb6_2-HVR-H2- | SIDYTTSTYYNP | 302 |
| G55T | | |
| mAb6_2-HVR-H2- | SIDYTGATYYNP | 303 |
| S56A | | |
| mAb6_2-HVR-H2- | SIDYTGDTYYNP | 304 |
| S56D | | |
| mAb6_2-HVR-H2- | SIDYTGQTYYNP | 305 |
| S56Q | | |
| mAb6_2-HVR-H2- | SIDYTGTTYYNP | 306 |
| S56T | | |
| mAb6_2-HVR-H2- | SIDYTGSAYYNP | 307 |
| T57A | | |
| mAb6_2-HVR-H2- | SIDYTGSDYYNP | 308 |
| T57D | | |
| mAb6_2-HVR-H2- | SIDYTGSEYYNP | 309 |
| T57E | | |
| mAb6_2-HVR-H2- | SIDYTGSTAYNP | 310 |
| Y58A | | |
| mAb6_2-HVR-H2- | SIDYTGSTFYNP | 311 |
| Y58F | | |
| mAb6_2-HVR-H2- | SIDYTGSTQYNP | 312 |
| Y58Q | | |
| mAb6_2-HVR-H2- | SIDYTGSTSYNP | 313 |
| Y58S | | |
| mAb6_2-HVR-H2- | SIDYTGSTWYNP | 314 |
| Y58W | | |
| mAb6_2-HVR-H2- | SIDYTGSTYYDP | 315 |
| N60D | | |
| mAb6_2-HVR-H2- | SIDYTGSTYYEP | 316 |
| N60E | | |
| mAb6_2-HVR-H2- | SIDYTGSTYYHP | 317 |
| N60H | | |
| mAb6_2-HVR-H2- | SIDYTGSTYYPP | 318 |
| N60P | | |
| mAb6_2-HVR-H2- | SIDYTGSTYYQP | 319 |
| N60Q | | |
| mAb6_2-HVR-H2- | SIDYTGSTYYNA | 320 |
| P61A | | |
| mAb6_2-HVR-H2- | SIDYTGSTYYNE | 321 |
| P61E | | |
| mAb6_2-HVR-H3- | AXGXYYXTYLGFDV | 322 |
| generic | X at position 2 is R, A, E, G, H, M, | |
| | N, Q, S, T, or Y; X at position 4 is | |
| | K, A, or S; X at position 7 is E or T. | |
| mAb6_2-HVR-H3- | AAGKYYETYLGFDV | 323 |
| R94A | | |
| mAb6_2-HVR-H3- | AEGKYYETYLGFDV | 324 |
| R94E | | |
| mAb6_2-HVR-H3- | AGGKYYETYLGFDV | 325 |
| R94G | | |
| mAb6_2-HVR-H3- | AHGKYYETYLGFDV | 326 |
| R94H | | |
| mAb6_2-HVR-H3- | AMGKYYETYLGFDV | 327 |
| R94M | | |
| mAb6_2-HVR-H3- | ANGKYYETYLGFDV | 328 |
| R94N | | |
| mAb6_2-HVR-H3- | AQGKYYETYLGFDV | 329 |
| R94Q | | |
| mAb6_2-HVR-H3- | ASGKYYETYLGFDV | 330 |
| R94S | | |
| mAb6_2-HVR-H3- | ATGKYYETYLGFDV | 331 |
| R94T | | |
| mAb6_2-HVR-H3- | AYGKYYETYLGFDV | 332 |
| R94Y | | |
| mAb6_2-HVR-H3- | ARGAYYETYLGFDV | 333 |
| K96A | | |
| mAb6_2-HVR-H3- | ARGSYYETYLGFDV | 334 |
| K96S | | |
| mAb6_2-HVR-H3- | ARGKYYTTYLGFDV | 335 |
| E99T | | |
| mAb2-HVR-H1- | XXXXXXW | 336 |
| generic | X at position 1 is S or D; X at position | |
| | 2 is T, A, D, E, G, H, K, N, P, Q, R, or | |
| | S; X at position 3 is S, D, E, G, K, N, P, | |
| | or R; X at position 4 is S, G, K, N, or P; | |
| | X at position 5 is Y, A, D, E, G, H, M, N, | |
| | Q, S, T, V, or W; X at position 6 is Y, A, | |
| | F, G, H, M, N, or Q. | |
| mAb2-HVR-H1- | DTSSYYW | 337 |
| S30D | | |
| mAb2-HVR-H1- | SASSYYW | 338 |
| T31A | | |
| mAb2-HVR-H1- | SDSSYYW | 339 |
| T31D | | |
| mAb2-HVR-H1- | SESSYYW | 340 |
| T31E | | |
| mAb2-HVR-H1- | SGSSYYW | 341 |
| T31G | | |
| mAb2-HVR-H1- | SHSSYYW | 342 |
| T31H | | |
| mAb2-HVR-H1- | SKSSYYW | 343 |
| T31K | | |
| mAb2-HVR-H1- | SNSSYYW | 344 |
| T31N | | |
| mAb2-HVR-H1- | SPSSYYW | 345 |
| T31P | | |
| mAb2-HVR-H1- | SQSSYYW | 346 |
| T31Q | | |
| mAb2-HVR-H1- | SRSSYYW | 347 |
| T31R | | |
| mAb2-HVR-H1- | SSSSYYW | 348 |
| T31S | | |
| mAb2-HVR-H1- | STDSYYW | 349 |
| S32D | | |
| mAb2-HVR-H1- | STESYYW | 350 |
| S32E | | |
| mAb2-HVR-H1- | STGSYYW | 351 |
| S32G | | |
| mAb2-HVR-H1- | STKSYYW | 352 |
| S32K | | |
| mAb2-HVR-H1- | STNSYYW | 353 |
| S32N | | |
| mAb2-HVR-H1- | STPSYYW | 354 |
| S32P | | |
| mAb2-HVR-H1- | STRSYYW | 355 |
| S32R | | |
| mAb2-HVR-H1- | STSGYYW | 356 |
| S33G | | |
| mAb2-HVR-H1- | STSKYYW | 357 |
| S33K | | |
| mAb2-HVR-H1- | STSNYYW | 358 |
| S33N | | |
| mAb2-HVR-H1- | STSPYYW | 359 |
| S33P | | |
| mAb2-HVR-H1- | STSSAYW | 360 |
| Y34A | | |
| mAb2-HVR-H1- | STSSDYW | 361 |
| Y34D | | |
| mAb2-HVR-H1- | STSSEYW | 362 |
| Y34E | | |
| mAb2-HVR-H1- | STSSGYW | 363 |
| Y34G | | |
| mAb2-HVR-H1- | STSSHYW | 364 |
| Y34H | | |
| mAb2-HVR-H1- | STSSMYW | 365 |
| Y34M | | |
| mAb2-HVR-H1- | STSSNYW | 366 |
| Y34N | | |
| mAb2-HVR-H1- | STSSQYW | 367 |
| Y34Q | | |
| mAb2-HVR-H1- | STSSSYW | 368 |
| Y34S | | |
| mAb2-HVR-H1- | STSSTYW | 369 |
| Y34T | | |
| mAb2-HVR-H1- | STSSVYW | 370 |
| Y34V | | |
| mAb2-HVR-H1- | STSSWYW | 371 |
| Y34W | | |
| mAb2-HVR-H1- | STSSYAW | 372 |
| Y35A | | |
| mAb2-HVR-H1- | STSSYFW | 373 |
| Y35F | | |
| mAb2-HVR-H1- | STSSYGW | 374 |
| Y35G | | |
| mAb2-HVR-H1- | STSSYHW | 375 |
| Y35H | | |
| mAb2-HVR-H1- | STSSYMW | 376 |
| Y35M | | |
| mAb2-HVR-H1- | STSSYNW | 377 |
| Y35N | | |
| mAb2-HVR-H1- | STSSYQW | 378 |
| Y35Q | | |
| mAb2-HVR-H2- | XXXXXXXXXYXP | 379 |
| generic | X at position 1 is S, F, I, M, or Q; X | |
| | at position 2 is I, A, G, L, R, S, T, or | |
| | V; X at position 3 is Y, A, D, E, F, G, | |
| | H, K, L, M, N, P, Q, R, S, T, or W; X at | |
| | position 4 is Y, A, D, E, F, G, H, K, N, | |
| | P, Q, R, S, T, or W; X at position 5 is | |
| | T, D, E, K, N, P, or Q; X at position 6 | |
| | is G or Q; X at position 7 is N, D, E, G, | |
| | H, I, K, M, P, R, or S; X at position 8 | |
| | is T, A, E, F, G, H, K, P, Q, R, S, V, W, | |
| | or Y; X at position 9 is Y or W; X at | |
| | position 11 is N, A, D, E, K, L, M, P, Q, | |
| | S or T. | |
| mAb2-HVR-H2- | FIYYTGNTYYNP | 380 |
| S50F | | |
| mAb2-HVR-H2- | IIYYTGNTYYNP | 381 |
| S50I | | |
| mAb2-HVR-H2- | MIYYTGNTYYNP | 382 |
| S50M | | |
| mAb2-HVR-H2- | QIYYTGNTYYNP | 383 |
| S50Q | | |
| mAb2-HVR-H2- | SAYYTGNTYYNP | 384 |
| I51A | | |
| mAb2-HVR-H2- | SGYYTGNTYYNP | 385 |
| I51G | | |
| mAb2-HVR-H2- | SLYYTGNTYYNP | 386 |
| I51L | | |
| mAb2-HVR-H2- | SRYYTGNTYYNP | 387 |
| I51R | | |
| mAb2-HVR-H2- | SSYYTGNTYYNP | 388 |
| I51S | | |
| mAb2-HVR-H2- | STYYTGNTYYNP | 389 |
| 151T | | |
| mAb2-HVR-H2- | SVYYTGNTYYNP | 390 |
| I51V | | |
| mAb2-HVR-H2- | SIAYTGNTYYNP | 391 |
| Y52A | | |
| mAb2-HVR-H2- | SIDYTGNTYYNP | 392 |
| Y52D | | |
| mAb2-HVR-H2- | SIEYTGNTYYNP | 393 |
| Y52E | | |
| mAb2-HVR-H2- | SIFYTGNTYYNP | 394 |
| Y52F | | |
| mAb2-HVR-H2- | SIGYTGNTYYNP | 395 |
| Y52G | | |
| mAb2-HVR-H2- | SIHYTGNTYYNP | 396 |
| Y52H | | |
| mAb2-HVR-H2- | SIKYTGNTYYNP | 397 |
| Y52K | | |
| mAb2-HVR-H2- | SILYTGNTYYNP | 398 |
| Y52L | | |
| mAb2-HVR-H2- | SIMYTGNTYYNP | 399 |
| Y52M | | |
| mAb2-HVR-H2- | SINYTGNTYYNP | 400 |
| Y52N | | |
| mAb2-HVR-H2- | SIPYTGNTYYNP | 401 |
| Y52P | | |
| mAb2-HVR-H2- | SIQYTGNTYYNP | 402 |
| Y52Q | | |
| mAb2-HVR-H2- | SIRYTGNTYYNP | 403 |
| Y52R | | |
| mAb2-HVR-H2- | SISYTGNTYYNP | 404 |
| Y52S | | |
| mAb2-HVR-H2- | SITYTGNTYYNP | 405 |
| Y52T | | |
| mAb2-HVR-H2- | SIWYTGNTYYNP | 406 |
| Y52W | | |
| mAb2-HVR-H2- | SIYATGNTYYNP | 407 |
| Y53A | | |
| mAb2-HVR-H2- | SIYDTGNTYYNP | 408 |
| Y53D | | |
| mAb2-HVR-H2- | SIYETGNTYYNP | 409 |
| Y53E | | |
| mAb2-HVR-H2- | SIYFTGNTYYNP | 410 |
| Y53F | | |
| mAb2-HVR-H2- | SIYGTGNTYYNP | 411 |
| Y53G | | |
| mAb2-HVR-H2- | SIYHTGNTYYNP | 412 |
| Y53H | | |
| mAb2-HVR-H2- | SIYKTGNTYYNP | 413 |
| Y53K | | |
| mAb2-HVR-H2- | SIYNTGNTYYNP | 414 |
| Y53N | | |
| mAb2-HVR-H2- | SIYPTGNTYYNP | 415 |
| Y53P | | |
| mAb2-HVR-H2- | SIYQTGNTYYNP | 416 |
| Y53Q | | |
| mAb2-HVR-H2- | SIYRTGNTYYNP | 417 |
| Y53R | | |
| mAb2-HVR-H2- | SIYSTGNTYYNP | 418 |
| Y53S | | |
| mAb2-HVR-H2- | SIYTTGNTYYNP | 419 |
| Y53T | | |
| mAb2-HVR-H2- | SIYWTGNTYYNP | 420 |
| Y53W | | |
| mAb2-HVR-H2- | SIYYDGNTYYNP | 421 |
| T54D | | |
| mAb2-HVR-H2- | SIYYEGNTYYNP | 422 |
| T54E | | |
| mAb2-HVR-H2- | SIYYKGNTYYNP | 423 |
| T54K | | |
| mAb2-HVR-H2- | SIYYNGNTYYNP | 424 |
| T54N | | |
| mAb2-HVR-H2- | SIYYPGNTYYNP | 425 |
| T54P | | |
| mAb2-HVR-H2- | SIYYQGNTYYNP | 426 |
| T54Q | | |
| mAb2-HVR-H2- | SIYYTQNTYYNP | 427 |
| G55Q | | |
| mAb2-HVR-H2- | SIYYTGDTYYNP | 428 |
| N56D | | |
| mAb2-HVR-H2- | SIYYTGETYYNP | 429 |
| N56E | | |
| mAb2-HVR-H2- | SIYYTGGTYYNP | 430 |
| N56G | | |
| mAb2-HVR-H2- | SIYYTGHTYYNP | 431 |
| N56H | | |
| mAb2-HVR-H2- | SIYYTGITYYNP | 432 |
| N56I | | |
| mAb2-HVR-H2- | SIYYTGKTYYNP | 433 |
| N56K | | |
| mAb2-HVR-H2- | SIYYTGMTYYNP | 434 |
| N56M | | |
| mAb2-HVR-H2- | SIYYTGPTYYNP | 435 |
| N56P | | |
| mAb2-HVR-H2- | SIYYTGRTYYNP | 436 |
| N56R | | |
| mAb2-HVR-H2- | SIYYTGSTYYNP | 437 |
| N56S | | |
| mAb2-HVR-H2- | SIYYTGNAYYNP | 438 |
| T57A | | |
| mAb2-HVR-H2- | SIYYTGNEYYNP | 439 |
| T57E | | |
| mAb2-HVR-H2- | SIYYTGNFYYNP | 440 |
| T57F | | |
| mAb2-HVR-H2- | SIYYTGNGYYNP | 441 |
| T57G | | |
| mAb2-HVR-H2- | SIYYTGNHYYNP | 442 |
| T57H | | |
| mAb2-HVR-H2- | SIYYTGNKYYNP | 443 |
| T57K | | |
| mAb2-HVR-H2- | SIYYTGNPYYNP | 444 |
| T57P | | |
| mAb2-HVR-H2- | SIYYTGNQYYNP | 445 |
| T57Q | | |
| mAb2-HVR-H2- | SIYYTGNRYYNP | 446 |
| T57R | | |
| mAb2-HVR-H2- | SIYYTGNSYYNP | 447 |
| T57S | | |
| mAb2-HVR-H2- | SIYYTGNVYYNP | 448 |
| T57V | | |
| mAb2-HVR-H2- | SIYYTGNWYYNP | 449 |
| T57W | | |
| mAb2-HVR-H2- | SIYYTGNYYYNP | 450 |
| T57Y | | |
| mAb2-HVR-H2- | SIYYTGNTWYNP | 451 |
| Y58W | | |
| mAb2-HVR-H2- | SIYYTGNTYYAP | 452 |
| N60A | | |
| mAb2-HVR-H2- | SIYYTGNTYYDP | 453 |
| N60D | | |
| mAb2-HVR-H2- | SIYYTGNTYYEP | 454 |
| N60E | | |
| mAb2-HVR-H2- | SIYYTGNTYYKP | 455 |
| N60K | | |
| mAb2-HVR-H2- | SIYYTGNTYYLP | 456 |
| N60L | | |
| mAb2-HVR-H2- | SIYYTGNTYYMP | 457 |
| N60M | | |
| mAb2-HVR-H2- | SIYYTGNTYYPP | 458 |
| N60P | | |
| mAb2-HVR-H2- | SIYYTGNTYYQP | 459 |
| N60Q | | |
| mAb2-HVR-H2- | SIYYTGNTYYSP | 460 |
| N60S | | |
| mAb2-HVR-H2- | SIYYTGNTYYTP | 461 |
| N60T | | |
| mAb2-HVR-H3- | XXXXXGXXVPRXFDP | 462 |
| generic | X at position 1 is A or V; X at | |
| | position 2 is R, A, G, N, Q, or T; | |
| | X at position 3 is V, A, F, I, K, | |
| | L, M, Q, or S; X at position 4 is | |
| | R, A, I, K, L, M, P, Q, S, T, or V; | |
| | X at position 5 is Y, H, I, L, or V; | |
| | X at position 7 is V, A, F, G, K, M, | |
| | N, Q, R, S, T, W, or Y; X at position | |
| | 8 is G, N, R, S, or T; X at position | |
| | 12 is Y, F, H, I, L, M, Q, or R. | |
| mAb2-HVR-H3- | VRVRYGVGVPRYFDP | 463 |
| A93V | | |
| mAb2-HVR-H3- | AAVRYGVGVPRYFDP | 464 |
| R94A | | |
| mAb2-HVR-H3- | AGVRYGVGVPRYFDP | 465 |
| R94G | | |
| mAb2-HVR-H3- | ANVRYGVGVPRYFDP | 466 |
| R94N | | |
| mAb2-HVR-H3- | AQVRYGVGVPRYFDP | 467 |
| R94Q | | |
| mAb2-HVR-H3- | ATVRYGVGVPRYFDP | 468 |
| R94T | | |
| mAb2-HVR-H3- | ARARYGVGVPRYFDP | 469 |
| V95A | | |
| mAb2-HVR-H3- | ARFRYGVGVPRYFDP | 470 |
| V95F | | |
| mAb2-HVR-H3- | ARIRYGVGVPRYFDP | 471 |
| V95I | | |
| mAb2-HVR-H3- | ARKRYGVGVPRYFDP | 472 |
| V95K | | |
| mAb2-HVR-H3- | ARLRYGVGVPRYFDP | 473 |
| V95L | | |
| mAb2-HVR-H3- | ARMRYGVGVPRYFDP | 474 |
| V95M | | |
| mAb2-HVR-H3- | ARQRYGVGVPRYFDP | 475 |
| V95Q | | |
| mAb2-HVR-H3- | ARSRYGVGVPRYFDP | 476 |
| V95S | | |
| mAb2-HVR-H3- | ARVAYGVGVPRYFDP | 477 |
| R96A | | |
| mAb2-HVR-H3- | ARVIYGVGVPRYFDP | 478 |
| R96I | | |
| mAb2-HVR-H3- | ARVKYGVGVPRYFDP | 479 |
| R96K | | |
| mAb2-HVR-H3- | ARVLYGVGVPRYFDP | 480 |
| R96L | | |
| mAb2-HVR-H3- | ARVMYGVGVPRYFDP | 481 |
| R96M | | |
| mAb2-HVR-H3- | ARVPYGVGVPRYFDP | 482 |
| R96P | | |
| mAb2-HVR-H3- | ARVQYGVGVPRYFDP | 483 |
| R96Q | | |
| mAb2-HVR-H3- | ARVSYGVGVPRYFDP | 484 |
| R96S | | |
| mAb2-HVR-H3- | ARVTYGVGVPRYFDP | 485 |
| R96T | | |
| mAb2-HVR-H3- | ARVVYGVGVPRYFDP | 486 |
| R96V | | |
| mAb2-HVR-H3- | ARVRHGVGVPRYFDP | 487 |
| Y97H | | |
| mAb2-HVR-H3- | ARVRIGVGVPRYFDP | 488 |
| Y97I | | |
| mAb2-HVR-H3- | ARVRLGVGVPRYFDP | 489 |
| Y97L | | |
| mAb2-HVR-H3- | ARVRVGVGVPRYFDP | 490 |
| Y97V | | |
| mAb2-HVR-H3- | ARVRYGAGVPRYFDP | 491 |
| V99A | | |
| mAb2-HVR-H3- | ARVRYGFGVPRYFDP | 492 |
| V99F | | |
| mAb2-HVR-H3- | ARVRYGGGVPRYFDP | 493 |
| V99G | | |
| mAb2-HVR-H3- | ARVRYGKGVPRYFDP | 494 |
| V99K | | |
| mAb2-HVR-H3- | ARVRYGMGVPRYFDP | 495 |
| V99M | | |
| mAb2-HVR-H3- | ARVRYGNGVPRYFDP | 496 |
| V99N | | |
| mAb2-HVR-H3- | ARVRYGQGVPRYFDP | 497 |
| V99Q | | |
| mAb2-HVR-H3- | ARVRYGRGVPRYFDP | 498 |
| V99R | | |
| mAb2-HVR-H3- | ARVRYGSGVPRYFDP | 499 |
| V99S | | |
| mAb2-HVR-H3- | ARVRYGTGVPRYFDP | 500 |
| V99T | | |
| mAb2-HVR-H3- | ARVRYGWGVPRYFDP | 501 |
| V99W | | |
| mAb2-HVR-H3- | ARVRYGYGVPRYFDP | 502 |
| V99Y | | |
| mAb2-HVR-H3- | ARVRYGVNVPRYFDP | 503 |
| G100N | | |
| mAb2-HVR-H3- | ARVRYGVRVPRYFDP | 504 |
| G100R | | |
| mAb2-HVR-H3- | ARVRYGVSVPRYFDP | 505 |
| G100S | | |
| mAb2-HVR-H3- | ARVRYGVTVPRYFDP | 506 |
| G100T | | |
| mAb2-HVR-H3- | ARVRYGVGVPRFFDP | 507 |
| Y100dF | | |
| mAb2-HVR-H3- | ARVRYGVGVPRHFDP | 508 |
| Y100dH | | |
| mAb2-HVR-H3- | ARVRYGVGVPRIFDP | 509 |
| Y100dI | | |
| mAb2-HVR-H3- | ARVRYGVGVPRLFDP | 510 |
| Y100dL | | |
| mAb2-HVR-H3- | ARVRYGVGVPRMFDP | 511 |
| Y100dM | | |
| mAb2-HVR-H3- | ARVRYGVGVPRQFDP | 512 |
| Y100dQ | | |
| mAb2-HVR-H3- | ARVRYGVGVPRRFDP | 513 |
| Y100dR | | |
| mAb6_2.7-HC | ELQLQESGPGLVKPSETLSLTCTVSGGSITASNTYWGWIRQPPGKGLEWIG | 581 |
| (SEQ ID NO: 191) + | SIDYTGSTYYNPSLKSRVTISVDTSKNQFSLKLSSVTAADTAVYYCATGKY | |
| c-term K | YETYLGFDVWGQGTLVTVSSASTKGPSVFPLAPSSKSTSGGTAALGCLVKD | |
| | YFPEPVTVSWNSGALTSGVHTFPAVLQSSGLYSLSSVVTVPSSSLGTQTYI | |
| | CNVNHKPSNTKVDKKVEPKSCDKTHTCPPCPAPELLGGPSVFLFPPKPKDT | |
| | LMISRTPEVTCVVVDVSHEDPEVKFNWYVDGVEVHNAKTKPREEQYGSTYR | |
| | VVSVLTVLHQDWLNGKEYKCKVSNKALPAPIEKTISKAKGQPREPQVYTLP | |
| | PSRDELTKNQVSLTCLVKGFYPSDIAVEWESNGQPENNYKTTPPVLDSDGS | |
| | FFLYSKLTVDKSRWQQGNVFSCSVMHEALHNHYTQKSLSLSPGK | |
| mAb6_2.7-HC | ELQLQESGPGLVKPSETLSLTCTVSGGSITASNTYWGWIRQPPGKGLEWIG | 582 |
| (SEQ ID NO: 191) + | SIDYTGSTYYNPSLKSRVTISVDTSKNQFSLKLSSVTAADTAVYYCATGKY | |
| YTE | YETYLGFDVWGQGTLVTVSSASTKGPSVFPLAPSSKSTSGGTAALGCLVKD | |
| | YFPEPVTVSWNSGALTSGVHTFPAVLQSSGLYSLSSVVTVPSSSLGTQTYI | |
| | CNVNHKPSNTKVDKKVEPKSCDKTHTCPPCPAPELLGGPSVFLFPPKPKDT | |
| | LYITREPEVTCVVVDVSHEDPEVKFNWYVDGVEVHNAKTKPREEQYGSTYR | |
| | VVSVLTVLHQDWLNGKEYKCKVSNKALPAPIEKTISKAKGQPREPQVYTLP | |
| | PSRDELTKNQVSLTCLVKGFYPSDIAVEWESNGQPENNYKTTPPVLDSDGS | |
| | FFLYSKLTVDKSRWQQGNVFSCSVMHEALHNHYTQKSLSLSPG | |
| mAb6_2.7-HC | ELQLQESGPGLVKPSETLSLTCTVSGGSITASNTYWGWIRQPPGKGLEWIG | 583 |
| (SEQ ID NO: 191) + | SIDYTGSTYYNPSLKSRVTISVDTSKNQFSLKLSSVTAADTAVYYCATGKY | |
| YTE + c-term K | YETYLGFDVWGQGTLVTVSSASTKGPSVFPLAPSSKSTSGGTAALGCLVKD | |
| | YFPEPVTVSWNSGALTSGVHTFPAVLQSSGLYSLSSVVTVPSSSLGTQTYI | |
| | CNVNHKPSNTKVDKKVEPKSCDKTHTCPPCPAPELLGGPSVFLFPPKPKDT | |
| | LYITREPEVTCVVVDVSHEDPEVKFNWYVDGVEVHNAKTKPREEQYGSTYR | |
| | VVSVLTVLHQDWLNGKEYKCKVSNKALPAPIEKTISKAKGQPREPQVYTLP | |
| | PSRDELTKNQVSLTCLVKGFYPSDIAVEWESNGQPENNYKTTPPVLDSDGS | |
| | FFLYSKLTVDKSRWQQGNVFSCSVMHEALHNHYTQKSLSLSPGK | |
| mAb6_2.7-HC | ELQLQESGPGLVKPSETLSLTCTVSGGSITASNTYWGWIRQPPGKGLEWIG | 584 |
| (knob) | SIDYTGSTYYNPSLKSRVTISVDTSKNQFSLKLSSVTAADTAVYYCATGKY | |
| (SEQ ID NO: 192) + | YETYLGFDVWGQGTLVTVSSASTKGPSVFPLAPSSKSTSGGTAALGCLVKD | |
| c-term K | YFPEPVTVSWNSGALTSGVHTFPAVLQSSGLYSLSSVVTVPSSSLGTQTYI | |
| | CNVNHKPSNTKVDKKVEPKSCDKTHTCPPCPAPELLGGPSVFLFPPKPKDT | |
| | LMISRTPEVTCVVVDVSHEDPEVKFNWYVDGVEVHNAKTKPREEQYGSTYR | |
| | VVSVLTVLHQDWLNGKEYKCKVSNKALPAPIEKTISKAKGQPREPQVYTLP | |
| | PSRDELTKNQVSLTCLVKGFYPSDIAVEWESNGQPENNYKTTPPVLDSDGS | |
| | FFLYSKLTVDKSRWQQGNVFSCSVMHEALHNHYTQKSLSLSPGK | |
| mAb6_2.7-HC | ELQLQESGPGLVKPSETLSLTCTVSGGSITASNTYWGWIRQPPGKGLEWIG | 585 |
| (knob) | SIDYTGSTYYNPSLKSRVTISVDTSKNQFSLKLSSVTAADTAVYYCATGKY | |
| (SEQ ID NO: 192) + | YETYLGFDVWGQGTLVTVSSASTKGPSVFPLAPSSKSTSGGTAALGCLVKD | |
| YTE | YFPEPVTVSWNSGALTSGVHTFPAVLQSSGLYSLSSVVTVPSSSLGTQTYI | |
| | CNVNHKPSNTKVDKKVEPKSCDKTHTCPPCPAPELLGGPSVFLFPPKPKDT | |
| | LYITREPEVTCVVVDVSHEDPEVKFNWYVDGVEVHNAKTKPREEQYGSTYR | |
| | VVSVLTVLHQDWLNGKEYKCKVSNKALPAPIEKTISKAKGQPREPQVYTLP | |
| | PSRDELTKNQVSLTCLVKGFYPSDIAVEWESNGQPENNYKTTPPVLDSDGS | |
| | FFLYSKLTVDKSRWQQGNVFSCSVMHEALHNHYTQKSLSLSPG | |
| mAb6_2.7-HC | ELQLQESGPGLVKPSETLSLTCTVSGGSITASNTYWGWIRQPPGKGLEWIG | 586 |
| (knob) | SIDYTGSTYYNPSLKSRVTISVDTSKNQFSLKLSSVTAADTAVYYCATGKY | |
| (SEQ ID NO: 192) + | YETYLGFDVWGQGTLVTVSSASTKGPSVFPLAPSSKSTSGGTAALGCLVKD | |
| YTE + c-term K | YFPEPVTVSWNSGALTSGVHTFPAVLQSSGLYSLSSVVTVPSSSLGTQTYI | |
| | CNVNHKPSNTKVDKKVEPKSCDKTHTCPPCPAPELLGGPSVFLFPPKPKDT | |
| | LYITREPEVTCVVVDVSHEDPEVKFNWYVDGVEVHNAKTKPREEQYGSTYR | |
| | VVSVLTVLHQDWLNGKEYKCKVSNKALPAPIEKTISKAKGQPREPQVYTLP | |
| | PSRDELTKNQVSLTCLVKGFYPSDIAVEWESNGQPENNYKTTPPVLDSDGS | |
| | FFLYSKLTVDKSRWQQGNVFSCSVMHEALHNHYTQKSLSLSPGK | |
| mAb6_2.7-HC | ELQLQESGPGLVKPSETLSLTCTVSGGSITASNTYWGWIRQPPGKGLEWIG | 587 |
| (hole) | SIDYTGSTYYNPSLKSRVTISVDTSKNQFSLKLSSVTAADTAVYYCATGKY | |
| (SEQ ID NO: 193) + | YETYLGFDVWGQGTLVTVSSASTKGPSVFPLAPSSKSTSGGTAALGCLVKD | |
| c-term K | YFPEPVTVSWNSGALTSGVHTFPAVLQSSGLYSLSSVVTVPSSSLGTQTYI | |
| | CNVNHKPSNTKVDKKVEPKSCDKTHTCPPCPAPELLGGPSVFLFPPKPKDT | |
| | LMISRTPEVTCVVVDVSHEDPEVKFNWYVDGVEVHNAKTKPREEQYGSTYR | |
| | VVSVLTVLHQDWLNGKEYKCKVSNKALPAPIEKTISKAKGQPREPQVYTLP | |
| | PSRDELTKNQVSLTCLVKGFYPSDIAVEWESNGQPENNYKTTPPVLDSDGS | |
| | FFLYSKLTVDKSRWQQGNVFSCSVMHEALHNHYTQKSLSLSPGK | |
| mAb6_2.7-HC | ELQLQESGPGLVKPSETLSLTCTVSGGSITASNTYWGWIRQPPGKGLEWIG | 588 |
| (hole) | SIDYTGSTYYNPSLKSRVTISVDTSKNQFSLKLSSVTAADTAVYYCATGKY | |
| (SEQ ID NO: 193) + | YETYLGFDVWGQGTLVTVSSASTKGPSVFPLAPSSKSTSGGTAALGCLVKD | |
| YTE | YFPEPVTVSWNSGALTSGVHTFPAVLQSSGLYSLSSVVTVPSSSLGTQTYI | |
| | CNVNHKPSNTKVDKKVEPKSCDKTHTCPPCPAPELLGGPSVFLFPPKPKDT | |
| | LYITREPEVTCVVVDVSHEDPEVKFNWYVDGVEVHNAKTKPREEQYGSTYR | |
| | VVSVLTVLHQDWLNGKEYKCKVSNKALPAPIEKTISKAKGQPREPQVYTLP | |
| | PSRDELTKNQVSLTCLVKGFYPSDIAVEWESNGQPENNYKTTPPVLDSDGS | |
| | FFLYSKLTVDKSRWQQGNVFSCSVMHEALHNHYTQKSLSLSPG | |
| mAb6_2.7-HC | ELQLQESGPGLVKPSETLSLTCTVSGGSITASNTYWGWIRQPPGKGLEWIG | 589 |
| (hole) | SIDYTGSTYYNPSLKSRVTISVDTSKNQFSLKLSSVTAADTAVYYCATGKY | |
| (SEQ ID NO: 193) + | YETYLGFDVWGQGTLVTVSSASTKGPSVFPLAPSSKSTSGGTAALGCLVKD | |
| YTE + c-term K | YFPEPVTVSWNSGALTSGVHTFPAVLQSSGLYSLSSVVTVPSSSLGTQTYI | |
| | CNVNHKPSNTKVDKKVEPKSCDKTHTCPPCPAPELLGGPSVFLFPPKPKDT | |
| | LYITREPEVTCVVVDVSHEDPEVKFNWYVDGVEVHNAKTKPREEQYGSTYR | |
| | VVSVLTVLHQDWLNGKEYKCKVSNKALPAPIEKTISKAKGQPREPQVYTLP | |
| | PSRDELTKNQVSLTCLVKGFYPSDIAVEWESNGQPENNYKTTPPVLDSDGS | |
| | FFLYSKLTVDKSRWQQGNVFSCSVMHEALHNHYTQKSLSLSPGK | |
| mAb2-HC | ELQLQESGPGLVKPSETLSLTCTVSGGSISTSSYYWGWIRQPPGKGLEWIG | 617 |
| (SEQ ID NO: 203) + | SIYYTGNTYYNPSLKSRVTISVDTSKNQFSLKLSSVTAADTAVYYCARVRY | |
| term K | GVGVPRYFDPWGQGTLVTVSSASTKGPSVFPLAPSSKSTSGGTAALGCLVK | |
| | DYFPEPVTVSWNSGALTSGVHTFPAVLQSSGLYSLSSVVTVPSSSLGTQTY | |
| | ICNVNHKPSNTKVDKKVEPKSCDKTHTCPPCPAPELLGGPSVFLFPPKPKD | |
| | TLMISRTPEVTCVVVDVSHEDPEVKFNWYVDGVEVHNAKTKPREEQYGSTY | |
| | RVVSVLTVLHQDWLNGKEYKCKVSNKALPAPIEKTISKAKGQPREPQVYTL | |
| | PPSRDELTKNQVSLTCLVKGFYPSDIAVEWESNGQPENNYKTTPPVLDSDG | |
| | SFFLYSKLTVDKSRWQQGNVFSCSVMHEALHNHYTQKSLSLSPGK | |
| mAb2-HC | ELQLQESGPGLVKPSETLSLTCTVSGGSISTSSYYWGWIRQPPGKGLEWIG | 618 |
| (SEQ ID NO: 203) + | SIYYTGNTYYNPSLKSRVTISVDTSKNQFSLKLSSVTAADTAVYYCARVRY | |
| YTE | GVGVPRYFDPWGQGTLVTVSSASTKGPSVFPLAPSSKSTSGGTAALGCLVK | |
| | DYFPEPVTVSWNSGALTSGVHTFPAVLQSSGLYSLSSVVTVPSSSLGTQTY | |
| | ICNVNHKPSNTKVDKKVEPKSCDKTHTCPPCPAPELLGGPSVFLFPPKPKD | |
| | TYITRETPEVTCVVVDVSHEDPEVKFNWYVDGVEVHNAKTKPREEQYGSTY | |
| | RVVSVLTVLHQDWLNGKEYKCKVSNKALPAPIEKTISKAKGQPREPQVYTL | |
| | PPSRDELTKNQVSLTCLVKGFYPSDIAVEWESNGQPENNYKTTPPVLDSDG | |
| | SFFLYSKLTVDKSRWQQGNVFSCSVMHEALHNHYTQKSLSLSPG | |
| mAb2-HC | ELQLQESGPGLVKPSETLSLTCTVSGGSISTSSYYWGWIRQPPGKGLEWIG | 619 |
| (SEQ ID NO: 203) + | SIYYTGNTYYNPSLKSRVTISVDTSKNQFSLKLSSVTAADTAVYYCARVRY | |
| YTE + c-term K | GVGVPRYFDPWGQGTLVTVSSASTKGPSVFPLAPSSKSTSGGTAALGCLVK | |
| | DYFPEPVTVSWNSGALTSGVHTFPAVLQSSGLYSLSSVVTVPSSSLGTQTY | |
| | ICNVNHKPSNTKVDKKVEPKSCDKTHTCPPCPAPELLGGPSVFLFPPKPKD | |
| | TYITRETPEVTCVVVDVSHEDPEVKFNWYVDGVEVHNAKTKPREEQYGSTY | |
| | RVVSVLTVLHQDWLNGKEYKCKVSNKALPAPIEKTISKAKGQPREPQVYTL | |
| | PPSRDELTKNQVSLTCLVKGFYPSDIAVEWESNGQPENNYKTTPPVLDSDG | |
| | SFFLYSKLTVDKSRWQQGNVFSCSVMHEALHNHYTQKSLSLSPGK | |
| mAb2-HC (knob) | ELQLQESGPGLVKPSETLSLTCTVSGGSTSTSSYYWGWIRQPPGKGLEWIG | 620 |
| (SEQ ID NO: 204) + | SIYYTGNTYYNPSLKSRVTISVDTSKNQFSLKLSSVTAADTAVYYCARVRY | |
| c-term K | GVGVPRYFDPWGQGTLVTVSSASTKGPSVFPLAPSSKSTSGGTAALGCLVK | |
| | DYFPEPVTVSWNSGALTSGVHTFPAVLQSSGLYSLSSVVTVPSSSLGTQTY | |
| | ICNVNHKPSNTKVDKKVEPKSCDKTHTCPPCPAPELLGGPSVFLFPPKPKD | |
| | TLMISRTPEVTCVVVDVSHEDPEVKFNWYVDGVEVHNAKTKPREEQYGSTY | |
| | RVVSVLTVLHQDWLNGKEYKCKVSNKALPAPIEKTISKAKGQPREPQVYTL | |
| | PPSRDELTKNQVSLTCLVKGFYPSDIAVEWESNGQPENNYKTTPPVLDSDG | |
| | SFFLYSKLTVDKSRWQQGNVFSCSVMHEALHNHYTQKSLSLSPGK | |
| mAb2-HC (knob) | ELQLQESGPGLVKPSETLSLTCTVSGGSTSTSSYYWGWIRQPPGKGLEWIG | 621 |
| (SEQ ID NO: 204) + | SIYYTGNTYYNPSLKSRVTISVDTSKNQFSLKLSSVTAADTAVYYCARVRY | |
| YTE | GVGVPRYFDPWGQGTLVTVSSASTKGPSVFPLAPSSKSTSGGTAALGCLVK | |
| | DYFPEPVTVSWNSGALTSGVHTFPAVLQSSGLYSLSSVVTVPSSSLGTQTY | |
| | ICNVNHKPSNTKVDKKVEPKSCDKTHTCPPCPAPELLGGPSVFLFPPKPKD | |
| | TYITRETPEVTCVVVDVSHEDPEVKFNWYVDGVEVHNAKTKPREEQYGSTY | |
| | RVVSVLTVLHQDWLNGKEYKCKVSNKALPAPIEKTISKAKGQPREPQVYTL | |
| | PPSRDELTKNQVSLTCLVKGFYPSDIAVEWESNGQPENNYKTTPPVLDSDG | |
| | SFFLYSKLTVDKSRWQQGNVFSCSVMHEALHNHYTQKSLSLSPG | |
| mAb2-HC (knob) | ELQLQESGPGLVKPSETLSLTCTVSGGSTSTSSYYWGWIRQPPGKGLEWIG | 622 |
| (SEQ ID NO: 204) + | SIYYTGNTYYNPSLKSRVTISVDTSKNQFSLKLSSVTAADTAVYYCARVRY | |
| YTE + c-term K | GVGVPRYFDPWGQGTLVTVSSASTKGPSVFPLAPSSKSTSGGTAALGCLVK | |
| | DYFPEPVTVSWNSGALTSGVHTFPAVLQSSGLYSLSSVVTVPSSSLGTQTY | |
| | ICNVNHKPSNTKVDKKVEPKSCDKTHTCPPCPAPELLGGPSVFLFPPKPKD | |
| | TYITRETPEVTCVVVDVSHEDPEVKFNWYVDGVEVHNAKTKPREEQYGSTY | |
| | RVVSVLTVLHQDWLNGKEYKCKVSNKALPAPIEKTISKAKGQPREPQVYTL | |
| | PPSRDELTKNQVSLTCLVKGFYPSDIAVEWESNGQPENNYKTTPPVLDSDG | |
| | SFFLYSKLTVDKSRWQQGNVFSCSVMHEALHNHYTQKSLSLSPGK | |
| mAb2-HC (hole) | ELQLQESGPGLVKPSETLSLTCTVSGGSTSTSSYYWGWIRQPPGKGLEWIG | 623 |
| (SEQ ID NO: 205) + | SIYYTGNTYYNPSLKSRVTISVDTSKNQFSLKLSSVTAADTAVYYCARVRY | |
| c-term K | GVGVPRYFDPWGQGTLVTVSSASTKGPSVFPLAPSSKSTSGGTAALGCLVK | |
| | DYFPEPVTVSWNSGALTSGVHTFPAVLQSSGLYSLSSVVTVPSSSLGTQTY | |
| | ICNVNHKPSNTKVDKKVEPKSCDKTHTCPPCPAPELLGGPSVFLFPPKPKD | |
| | TLMISRTPEVTCVVVDVSHEDPEVKFNWYVDGVEVHNAKTKPREEQYGSTY | |
| | RVVSVLTVLHQDWLNGKEYKCKVSNKALPAPIEKTISKAKGQPREPQVYTL | |
| | PPSRDELTKNQVSLTCLVKGFYPSDIAVEWESNGQPENNYKTTPPVLDSDG | |
| | SFFLYSKLTVDKSRWQQGNVFSCSVMHEALHNHYTQKSLSLSPGK | |
| mAb2-HC (hole) | ELQLQESGPGLVKPSETLSLTCTVSGGSTSTSSYYWGWIRQPPGKGLEWIG | 624 |
| (SEQ ID NO: 205) + | SIYYTGNTYYNPSLKSRVTISVDTSKNQFSLKLSSVTAADTAVYYCARVRY | |
| YTE | GVGVPRYFDPWGQGTLVTVSSASTKGPSVFPLAPSSKSTSGGTAALGCLVK | |
| | DYFPEPVTVSWNSGALTSGVHTFPAVLQSSGLYSLSSVVTVPSSSLGTQTY | |
| | ICNVNHKPSNTKVDKKVEPKSCDKTHTCPPCPAPELLGGPSVFLFPPKPKD | |
| | TYITRETPEVTCVVVDVSHEDPEVKFNWYVDGVEVHNAKTKPREEQYGSTY | |
| | RVVSVLTVLHQDWLNGKEYKCKVSNKALPAPIEKTISKAKGQPREPQVYTL | |
| | PPSRDELTKNQVSLTCLVKGFYPSDIAVEWESNGQPENNYKTTPPVLDSDG | |
| | SFFLYSKLTVDKSRWQQGNVFSCSVMHEALHNHYTQKSLSLSPG | |
| mAb2-HC (hole) | ELQLQESGPGLVKPSETLSLTCTVSGGSTSTSSYYWGWIRQPPGKGLEWIG | 625 |
| (SEQ ID NO: 205) + | SIYYTGNTYYNPSLKSRVTISVDTSKNQFSLKLSSVTAADTAVYYCARVRY | |
| YTE + c-term K | GVGVPRYFDPWGQGTLVTVSSASTKGPSVFPLAPSSKSTSGGTAALGCLVK | |
| | DYFPEPVTVSWNSGALTSGVHTFPAVLQSSGLYSLSSVVTVPSSSLGTQTY | |
| | ICNVNHKPSNTKVDKKVEPKSCDKTHTCPPCPAPELLGGPSVFLFPPKPKD | |
| | TYITRETPEVTCVVVDVSHEDPEVKFNWYVDGVEVHNAKTKPREEQYGSTY | |
| | RVVSVLTVLHQDWLNGKEYKCKVSNKALPAPIEKTISKAKGQPREPQVYTL | |
| | PPSRDELTKNQVSLTCLVKGFYPSDIAVEWESNGQPENNYKTTPPVLDSDG | |
| | SFFLYSKLTVDKSRWQQGNVFSCSVMHEALHNHYTQKSLSLSPGK | |
| mAb2.10-HC | ELQLQESGPGLVKPSETLSLTCTVSGGSTSTSSYYWGWIRQPPGKGLEWIG | 707 |
| (SEQ ID NO: 233) + | SIYYTGNTYYNPSLKSRVTISVDTSKNQFSLKLSSVTAADTAVYYCARVRY | |
| c-term K | GVGVPRYFDPWGQGTLVTVSSASTKGPSVFPLAPSSKSTSGGTAALGCLVK | |
| | DYFPEPVTVSWNSGALTSGVHTFPAVLQSSGLYSLSSVVTVPSSSLGTQTY | |
| | ICNVNHKPSNTKVDKKVEPKSCDKTHTCPPCPAPELLGGPSVFLFPPKPKD | |
| | TLMISRTPEVTCVVVDVSHEDPEVKFNWYVDGVEVHNAKTKPREEQYGSTY | |
| | RVVSVLTVLHQDWLNGKEYKCKVSNKALPAPIEKTISKAKGQPREPQVYTL | |
| | PPSRDELTKNQVSLTCLVKGFYPSDIAVEWESNGQPENNYKTTPPVLDSDG | |
| | SFFLYSKLTVDKSRWQQGNVFSCSVMHEALHNHYTQKSLSLSPGK | |
| mAb2.10-HC | ELQLQESGPGLVKPSETLSLTCTVSGGSTSTSSYYWGWIRQPPGKGLEWIG | 708 |
| (SEQ ID NO: 233) + | SIYYTGNTYYNPSLKSRVTISVDTSKNQFSLKLSSVTAADTAVYYCARVRY | |
| YTE | GVGVPRYFDPWGQGTLVTVSSASTKGPSVFPLAPSSKSTSGGTAALGCLVK | |
| | DYFPEPVTVSWNSGALTSGVHTFPAVLQSSGLYSLSSVVTVPSSSLGTQTY | |
| | ICNVNHKPSNTKVDKKVEPKSCDKTHTCPPCPAPELLGGPSVFLFPPKPKD | |
| | TYITRETPEVTCVVVDVSHEDPEVKFNWYVDGVEVHNAKTKPREEQYGSTY | |
| | RVVSVLTVLHQDWLNGKEYKCKVSNKALPAPIEKTISKAKGQPREPQVYTL | |
| | PPSRDELTKNQVSLTCLVKGFYPSDIAVEWESNGQPENNYKTTPPVLDSDG | |
| | SFFLYSKLTVDKSRWQQGNVFSCSVMHEALHNHYTQKSLSLSPG | |
| mAb2.10-HC | ELQLQESGPGLVKPSETLSLTCTVSGGSTSTSSYYWGWIRQPPGKGLEWIG | 709 |
| (SEQ ID NO: 233) + | SIYYTGNTYYNPSLKSRVTISVDTSKNQFSLKLSSVTAADTAVYYCARVRY | |
| YTE + c-term K | GVGVPRYFDPWGQGTLVTVSSASTKGPSVFPLAPSSKSTSGGTAALGCLVK | |
| | DYFPEPVTVSWNSGALTSGVHTFPAVLQSSGLYSLSSVVTVPSSSLGTQTY | |
| | ICNVNHKPSNTKVDKKVEPKSCDKTHTCPPCPAPELLGGPSVFLFPPKPKD | |
| | TYITRETPEVTCVVVDVSHEDPEVKFNWYVDGVEVHNAKTKPREEQYGSTY | |
| | RVVSVLTVLHQDWLNGKEYKCKVSNKALPAPIEKTISKAKGQPREPQVYTL | |
| | PPSRDELTKNQVSLTCLVKGFYPSDIAVEWESNGQPENNYKTTPPVLDSDG | |
| | SFFLYSKLTVDKSRWQQGNVFSCSVMHEALHNHYTQKSLSLSPGK | |
| mAb2.10-HC | ELQLQESGPGLVKPSETLSLTCTVSGGSTSTSSYYWGWIRQPPGKGLEWIG | 710 |
| (knob) | SIYYTGNTYYNPSLKSRVTISVDTSKNQFSLKLSSVTAADTAVYYCARVRY | |
| (SEQ ID NO: 234) + | GVGVPRYFDPWGQGTLVTVSSASTKGPSVFPLAPSSKSTSGGTAALGCLVK | |
| c-term K | DYFPEPVTVSWNSGALTSGVHTFPAVLQSSGLYSLSSVVTVPSSSLGTQTY | |
| | ICNVNHKPSNTKVDKKVEPKSCDKTHTCPPCPAPELLGGPSVFLFPPKPKD | |
| | TLMISRTPEVTCVVVDVSHEDPEVKFNWYVDGVEVHNAKTKPREEQYGSTY | |
| | RVVSVLTVLHQDWLNGKEYKCKVSNKALPAPIEKTISKAKGQPREPQVYTL | |
| | PPSRDELTKNQVSLTCLVKGFYPSDIAVEWESNGQPENNYKTTPPVLDSDG | |
| | SFFLYSKLTVDKSRWQQGNVFSCSVMHEALHNHYTQKSLSLSPGK | |
| mAb2.10-HC (knob) | ELQLQESGPGLVKPSETLSLTCTVSGGSTSTSSYYWGWIRQPPGKGLEWIG | 711 |
| (SEQ ID NO: 234) + | SIYYTGNTYYNPSLKSRVTISVDTSKNQFSLKLSSVTAADTAVYYCARVRY | |
| YTE | GVGVPRYFDPWGQGTLVTVSSASTKGPSVFPLAPSSKSTSGGTAALGCLVK | |
| | DYFPEPVTVSWNSGALTSGVHTFPAVLQSSGLYSLSSVVTVPSSSLGTQTY | |
| | ICNVNHKPSNTKVDKKVEPKSCDKTHTCPPCPAPELLGGPSVFLFPPKPKD | |
| | TYITRETPEVTCVVVDVSHEDPEVKFNWYVDGVEVHNAKTKPREEQYGSTY | |
| | RVVSVLTVLHQDWLNGKEYKCKVSNKALPAPIEKTISKAKGQPREPQVYTL | |
| | PPSRDELTKNQVSLTCLVKGFYPSDIAVEWESNGQPENNYKTTPPVLDSDG | |
| | SFFLYSKLTVDKSRWQQGNVFSCSVMHEALHNHYTQKSLSLSPG | |
| mAb2.10-HC | ELQLQESGPGLVKPSETLSLTCTVSGGSTSTSSYYWGWIRQPPGKGLEWIG | 712 |
| (knob) | SIYYTGNTYYNPSLKSRVTISVDTSKNQFSLKLSSVTAADTAVYYCARVRY | |
| (SEQ ID NO: 234) + | GVGVPRYFDPWGQGTLVTVSSASTKGPSVFPLAPSSKSTSGGTAALGCLVK | |
| YTE + c-term K | DYFPEPVTVSWNSGALTSGVHTFPAVLQSSGLYSLSSVVTVPSSSLGTQTY | |
| | ICNVNHKPSNTKVDKKVEPKSCDKTHTCPPCPAPELLGGPSVFLFPPKPKD | |
| | TYITRETPEVTCVVVDVSHEDPEVKFNWYVDGVEVHNAKTKPREEQYGSTY | |
| | RVVSVLTVLHQDWLNGKEYKCKVSNKALPAPIEKTISKAKGQPREPQVYTL | |
| | PPSRDELTKNQVSLTCLVKGFYPSDIAVEWESNGQPENNYKTTPPVLDSDG | |
| | SFFLYSKLTVDKSRWQQGNVFSCSVMHEALHNHYTQKSLSLSPGK | |
| mAb2.10-HC | ELQLQESGPGLVKPSETLSLTCTVSGGSTSTSSYYWGWIRQPPGKGLEWIG | 713 |
| (hole) | SIYYTGNTYYNPSLKSRVTISVDTSKNQFSLKLSSVTAADTAVYYCARVRY | |
| (SEQ ID NO: 235) + | GVGVPRYFDPWGQGTLVTVSSASTKGPSVFPLAPSSKSTSGGTAALGCLVK | |
| c-term K | DYFPEPVTVSWNSGALTSGVHTFPAVLQSSGLYSLSSVVTVPSSSLGTQTY | |
| | ICNVNHKPSNTKVDKKVEPKSCDKTHTCPPCPAPELLGGPSVFLFPPKPKD | |
| | TLMISRTPEVTCVVVDVSHEDPEVKFNWYVDGVEVHNAKTKPREEQYGSTY | |
| | RVVSVLTVLHQDWLNGKEYKCKVSNKALPAPIEKTISKAKGQPREPQVYTL | |
| | PPSRDELTKNQVSLTCLVKGFYPSDIAVEWESNGQPENNYKTTPPVLDSDG | |
| | SFFLYSKLTVDKSRWQQGNVFSCSVMHEALHNHYTQKSLSLSPGK | |
| mAb2.10-HC | ELQLQESGPGLVKPSETLSLTCTVSGGSTSTSSYYWGWIRQPPGKGLEWIG | 714 |
| (hole) | SIYYTGNTYYNPSLKSRVTISVDTSKNQFSLKLSSVTAADTAVYYCARVRY | |
| (SEQ ID NO: 235) + | GVGVPRYFDPWGQGTLVTVSSASTKGPSVFPLAPSSKSTSGGTAALGCLVK | |
| YTE | DYFPEPVTVSWNSGALTSGVHTFPAVLQSSGLYSLSSVVTVPSSSLGTQTY | |
| | ICNVNHKPSNTKVDKKVEPKSCDKTHTCPPCPAPELLGGPSVFLFPPKPKD | |
| | TYITRETPEVTCVVVDVSHEDPEVKFNWYVDGVEVHNAKTKPREEQYGSTY | |
| | RVVSVLTVLHQDWLNGKEYKCKVSNKALPAPIEKTISKAKGQPREPQVYTL | |
| | PPSRDELTKNQVSLTCLVKGFYPSDIAVEWESNGQPENNYKTTPPVLDSDG | |
| | SFFLYSKLTVDKSRWQQGNVFSCSVMHEALHNHYTQKSLSLSPG | |
| mAb2.10-HC | ELQLQESGPGLVKPSETLSLTCTVSGGSTSTSSYYWGWIRQPPGKGLEWIG | 715 |
| (hole) | SIYYTGNTYYNPSLKSRVTISVDTSKNQFSLKLSSVTAADTAVYYCARVRY | |
| (SEQ ID NO: 235) + | GVGVPRYFDPWGQGTLVTVSSASTKGPSVFPLAPSSKSTSGGTAALGCLVK | |
| YTE + c-term K | DYFPEPVTVSWNSGALTSGVHTFPAVLQSSGLYSLSSVVTVPSSSLGTQTY | |
| | ICNVNHKPSNTKVDKKVEPKSCDKTHTCPPCPAPELLGGPSVFLFPPKPKD | |
| | TYITRETPEVTCVVVDVSHEDPEVKFNWYVDGVEVHNAKTKPREEQYGSTY | |
| | RVVSVLTVLHQDWLNGKEYKCKVSNKALPAPIEKTISKAKGQPREPQVYTL | |
| | PPSRDELTKNQVSLTCLVKGFYPSDIAVEWESNGQPENNYKTTPPVLDSDG | |
| | SFFLYSKLTVDKSRWQQGNVFSCSVMHEALHNHYTQKSLSLSPGK | |

[0152] 1. Binding Affinity and Cell-Signaling Inhibition of Anti-IL-36 Antibodies

[0153] In some embodiments, the anti-IL-36 antibodies provided herein have an equilibrium dissociation constant (K_{D}) for binding the human cytokines, hu-IL-36α, hu-IL-36β, and/or hu-IL-36γ of <100 nM, <10 nM, <1 nM, <0.1 nM, <0.01 nM, or <0.001 nM (e.g., 10⁻⁸ M or less, from 10⁻⁸ M to 10⁻¹³ M, e.g. from 10⁻⁹ M to 10⁻¹³ M). More specifically, in some embodiments, the anti-IL-36 antibodies of the present disclosure bind to hu-IL-36α, hu-IL-36β, and/or hu-IL-36γ with a binding affinity of 1×10⁻⁸ M or less, 1×10⁻⁹M or less, 1×10⁻¹⁰ M or less, or 1×10⁻¹¹ M or less. In some embodiments, the binding affinity is measured as the equilibrium dissociation constant (K_{D}) for binding to the hu-IL-36α, hu-IL-36β, or hu-IL-36γ polypeptide constructs of SEQ ID NO: 1, 2, and 3, respectively.

[0154] Generally, binding affinity of a ligand to its receptor can be determined using any of a variety of assays and expressed in terms of a variety of quantitative values. Specific IL-36 binding assays useful in determining affinity of the antibodies are disclosed in the Examples herein. Additionally, antigen binding assays are known in the art and can be used herein including without limitation any direct or competitive binding assays using techniques such as western blots, radioimmunoassays, enzyme-linked immunoabsorbent assay (ELISA), “sandwich” immunoassays, surface plasmon resonance based assay (such as the BIAcore assay as described in WO2005/012359), immunoprecipitation assays, fluorescent immunoassays, and protein A immunoassays.

[0155] In some embodiments, the binding affinity is expressed as K_{D} values and reflects intrinsic binding affinity (e.g., with minimized avidity effects). The anti-IL-36 antibodies of the present disclosure exhibit strong binding affinities for the hu-IL-36α, hu-IL-36β, and/or hu-IL-36γ polypeptide constructs of SEQ ID NO: 1, 2, and 3, respectively, for example, exhibiting K_{D} values of between 10 nM and 1 μM.

[0156] In some embodiments, the anti-IL-36 antibodies provided herein decrease, inhibit, and/or fully-block intracellular signaling by IL-36-mediated pathways, specifically, the signaling pathways that are stimulated by binding to IL-36R of IL-36α, IL-36β, and/or IL-36γ. The ability of the antibodies to inhibit these IL-36-mediated signaling pathways can be assayed in vitro using known cell-based blocking assays including, the HEK-BLUE™ reporter cell assays and the primary cell-based blocking assays described in the Examples of the present disclosure. In some instances, IL-8 expression may be employed as an indicator of signaling through an IL-36-mediated pathway, including e.g., where reduced IL-8 levels indicate blocking of one or more IL-36-mediated pathways.

[0157] In some embodiments, the ability of the antibody to decrease, inhibit, and/or fully-block IL-36 stimulated signaling is determined as IC₅₀ of the antibody using a reporter cell-based blocking assay with the agonist cytokine(s) IL-36α, IL-36β, and/or IL-36γ at a concentration of about EC₅₀. The agonist EC₅₀ often can only be estimated prior to the assay and is determined after the assay is completed using nonlinear regression analysis of the data. In such assays, a value of about EC₅₀ typically will be in the range of from EC₄₀₋₄₅ to EC₅₅₋₆₀.

[0158] Accordingly, in some embodiments, the IL-36 antibodies of the present disclosure are characterized by one or more of the following functional properties based on the ability to decrease, inhibit, and/or fully-block intracellular signaling by IL-36-mediated pathways.

[0159] In some embodiments of the anti-IL-36 antibody, the antibody decreases a signal stimulated by (or initiated by) any of IL-36α, IL-36β, or IL-36γ, by at least 90%, at least 95%, at least 99%, or 100%. In some embodiments, the decrease in signal can be measured using a cell-based assay. One of ordinary skill can select any of the known cell-based assays known for use in determining inhibition of cell-signaling of an IL-36 stimulated pathway. Generally, the anti-IL-36 antibodies of the present disclosure decrease the IL-36-mediated intracellular signal initiated by binding of an agonist cytokine IL-36α, IL-36β, or IL-36γ at a concentration of about EC₅₀ (e.g., EC₄₀ to EC₆₀) with an IC₅₀ value for the antibody of 10 nM or less, 5 nM or less, or 1 nM.

[0160] In some embodiments the anti-IL-36 antibody decreases an IL-36 stimulated signal by at least 95%, or at least 99%; optionally, wherein the IL-36 stimulated signal is stimulated by an agonist cytokine selected from IL-36α, IL-36β, and IL-36γ; optionally, wherein at an agonist cytokine concentration of about EC₅₀ the antibody has an IC₅₀ of 10 nM or less, 5 nM or less, or 1 nM or less.

[0161] In some embodiments the anti-IL-36 antibody decreases an intracellular signal initiated by one or more of IL-36α, IL-36β, and IL-36γ agonist binding to its cognate receptor by at least 90%, at least 95%, at least 99%, or 100%.

[0162] In some embodiments the anti-IL-36 antibody inhibits IL-36α, IL-36β, and/or IL-36γ stimulated release of IL-8 from primary human keratinocyte cells and/or HaCAT cells; optionally, wherein at an IL-36α, IL-36β, and/or IL-36γ concentration of about EC₅₀ the antibody has an IC₅₀ of 10 nM or less, 5 nM or less, or 1 nM or less.

[0163] 2. Antibody Fragments

[0164] In some embodiments, the anti-IL-36 antibody of the present disclosure can be an antibody fragment. Antibody fragments useful with the binding determinants the present disclosure include, but are not limited to, Fab, Fab′, Fab′-SH, F(ab′)2, Fv, monovalent, one-armed (or single-armed) antibodies, scFv fragments, and other fragments described herein and known in the art. For a review of various antibody fragments, see e.g., Hudson et al. Nat. Med. 9: 129-134 (2003), For a review of scFv fragments, see, e.g., Pluckthun, in The Pharmacology of Monoclonal Antibodies, vol. 113, Rosenburg and Moore eds., (Springer-Verlag, New York), pp. 269-315 (1994); see also WO93/16185; and U.S. Pat. Nos. 5,571,894 and 5,587,458. For a description of Fab and F(ab′)₂ fragments comprising salvage receptor binding epitope residues and having increased in vivo half-life, see U.S. Pat. No. 5,869,046. Other monovalent antibody forms are described in, e.g., WO2007/048037, WO2008/145137, WO2008/145138, and WO2007/059782, Monovalent, single-armed antibodies are described, e.g., in WO2005/063816. Diabodies are antibody fragments with two antigen-binding sites that may be bivalent or bispecific (see e.g., EP0404097; WO93/01161; Hudson et al., Nat. Med, 9: 129-134 (2003); and Hollinger et al., Proc. Natl. Acad. Sci. USA 90: 6444-6448 (1993)).

[0165] In some embodiments, the antibody fragments are single-domain antibodies which comprise all or a portion of the heavy chain variable domain or all or a portion of the light chain variable domain of an antibody. In some embodiments, a single-domain antibody is a human single-domain antibody (Domantis, Inc., Waltham, Mass.; see, e.g., U.S. Pat. No. 6,248,516).

[0166] Antibody fragments can be made by various techniques, including but not limited to proteolytic digestion of an intact antibody as well as production by recombinant host cells (e.g., E. coli or phage), as described herein.

[0167] It is contemplated that any of the anti-IL-36 antibodies of the present disclosure can be prepared as antibody fragments using the methods and techniques known in the art and/or described herein. For example, the preparation and analysis of Fab versions of various anti-IL-36 antibodies of the present disclosure are described in the Examples below.

[0168] 3. Chimeric and Humanized Antibodies

[0169] In some embodiments, the anti-IL-36 antibody of the present disclosure can be a chimeric antibody. (See e.g., chimeric antibodies as described in U.S. Pat. No. 4,816,567; and Morrison et al., Proc. Natl. Acad. Sci. USA, 81:6851-6855 (1984)). In one embodiment, a chimeric antibody comprises a non-human variable region (e.g., a variable region derived from a mouse, rat, hamster, rabbit, or non-human primate, such as a monkey) and a human constant region. In some embodiments, a chimeric antibody is a “class switched” antibody in which the class or subclass has been changed from that of the parent antibody. It is contemplated that chimeric antibodies can include antigen-binding fragments thereof.

[0170] In some embodiments, the anti-IL-36 antibody of the present disclosure is a humanized antibody. Typically, a non-human antibody is humanized to reduce immunogenicity to humans, while retaining the specificity and affinity of the parental non-human antibody. Generally, a humanized antibody comprises one or more variable domains in which HVRs, e.g., CDRs, (or portions thereof) are derived from a non-human antibody, and FRs (or portions thereof) are derived from human antibody sequences. A humanized antibody optionally will also comprise at least a portion of a human constant region. In some embodiments, some FR residues in a humanized antibody are substituted with corresponding residues from a non-human antibody (e.g., the antibody from which the CDR residues are derived) to restore or improve antibody specificity or affinity.

[0171] Humanized antibodies and methods of making them are reviewed, e.g., in Almagro and Fransson, Front. Biosci. 13: 1619-1633 (2008), and are further described, e.g., in Riechmann et al., Nature 332:323-329 (1988); Queen et al., Proc. Nat'l Acad. Sci. USA 86: 10029-10033 (1989); U.S. Pat. Nos. 5,821,337, 7,527,791, 6,982,321, and 7,087,409; Kashmiri et al, Methods 36:25-34 (2005) (describing SDR (a-HVR) grafting); Padlan, Mol. Immunol. 28:489-498 (1991) (describing “resurfacing”); Dall'Acqua et al., Methods 36:43-60 (2005) (describing “FR shuffling”); and Osbourn et al., Methods 36:61-68 (2005) and Klimka et al., Br. J. Cancer, 83:252-260 (2000) (describing the “guided selection” approach to FR shuffling).

[0172] Human framework regions that are useful for humanization include but are not limited to: framework regions selected using the “best-fit” method (see, e.g., Sims et al. J. Immunol. 151:2296 (1993)); framework regions derived from the consensus sequence of human antibodies of a particular subgroup of light or heavy chain variable regions (see, e.g., Carter et al. Proc. Natl. Acad. Sci. USA, 89:4285 (1992); and Presta et al. J. Immunol, 151:2623 (1993)); human mature (somatically mutated) framework regions or human germline framework regions (see, e.g., Almagro and Fransson, Front. Biosci. 13: 1619-1633 (2008)); and framework regions derived from screening FR libraries (see, e.g., Baca et al., J. Biol. Chem. 272: 10678-10684 (1997) and Rosok et al., J. Biol. Chem. 271:2261 1-22618 (1996)).

[0173] It is contemplated that any of the anti-IL-36 antibodies of the present disclosure can be prepared as humanized antibodies using the methods and techniques known in the art and/or described herein,

[0174] 4. Human Antibodies

[0175] In some embodiments, the anti-IL-36 antibody of the present disclosure can be a human antibody. Human antibodies can be produced using various techniques known in the art. Human antibodies are described generally in van Dijk and van de Winkel, Curr. Opin. Pharmacol. 5: 368-74 (2001) and Lonberg, Curr. Opin. Immunol. 20:450-459 (2008). Human antibodies may be prepared by administering an immunogen to a transgenic animal that has been modified to produce intact human antibodies or intact antibodies with human variable regions in response to antigenic challenge. Such animals typically contain all or a portion of the human immunoglobulin loci, which replace the endogenous immunoglobulin loci, or which are present extrachromosomally or integrated randomly into the animal's chromosomes. In such transgenic mice, the endogenous immunoglobulin loci have generally been inactivated. For review of methods for obtaining human antibodies from transgenic animals, see Lonberg, Nat. Biotech. 23:1117-1125 (2005). See also, e.g., XENOMOUSE™ technology in U.S. Pat. Nos. 6,075,181 and 6,150,584; HUMAB® technology in U.S. Pat. No. 5,770,429; K-M MOUSE® technology in U.S. Pat. No. 7,041,870; and VELOCIMOUSE® technology in U.S. Pat. Appl. Pub. No. US 2007/0061900). Human variable regions from intact antibodies generated by such animals may be further modified, e.g., by combining with a different human constant region.

[0176] Human antibodies can also be made by hybridoma-based methods. Human myeloma and mouse-human heteromyeloma cell lines for the production of human monoclonal antibodies have been described. See, e.g., Kozbor J. Immunol, 133: 3001 (1984); Brodeur et al., Monoclonal Antibody Production Techniques and Applications, pp. 51-63 (Marcel Dekker, Inc., New York, 1987); and Boerner et al., J. Immunol., 147: 86 (1991). Human antibodies generated via human B-cell hybridoma technology are also described in Li et al., Proc. Natl. Acad. Sci. USA, 103:3557-3562 (2006). Additional methods describing production of monoclonal human IgM antibodies from hybridoma cell lines include those described in e.g., U.S. Pat. No. 7,189,826. Human hybridoma technology (i.e., the trioma technique) is described in e.g., Vollmers et al., Histology and Histopathology, 20(3):927-937 (2005) and Vollmers et al., and Methods and Findings in Experimental and Clinical Pharmacology, 27(3): 185-91 (2005).

[0177] Human antibodies may also be generated by isolating Fv clone variable domain sequences selected from human-derived phage display libraries. Such variable domain sequences may then be combined with a desired human constant domain. Techniques for selecting human antibodies from antibody libraries are described below.

[0178] It is contemplated that any of the anti-IL-36 antibodies of the present disclosure can be prepared as human antibodies using the methods and techniques known in the art and/or described herein, including in the Examples.

[0179] 5. Library-Derived Antibodies

[0180] In some embodiments, the anti-IL-36 antibody of the present disclosure may be isolated by screening combinatorial libraries for antibodies with the desired activity or activities. For example, a method may be used to generate a phage display library and the library may be screened for antibodies possessing the desired binding characteristics. The use of phage display for preparation of affinity matured variants of the humanized version of the anti-IL-36 antibody of the present disclosure are described in the Examples disclosed herein. Other methods for producing such library-derived antibodies can be found in e.g., Hoogenboom et al., Methods in Molecular Biology 178: 1-37 (O'Brien et al., ed., Human Press, Totowa, N.J., 2001); McCafferty et al., Nature 348:552-554; Clackson et al., Nature 352: 624-628 (1991); Marks et al., J. Mol. Biol. 222: 581-597 (1992); Marks and Bradbury, m Methods in Molecular Biology 248; 161-175 (Lo, ed., Human Press, Totowa, N.J., 2003); Sidhu et al., J. Mol. Biol. 338(2): 299-310 (2004); Lee et al., J. Mol. Biol. 340(5); 1073-1093 (2004); Fellouse, Proc. Natl. Acad. Sci. USA 101(34): 12467-12472 (2004); and Lee et al., J, Immunol. Methods 284(1-2): 1 19-132(2004).

[0181] It is contemplated that combinatorial library screening can be used to generate variants of the anti-IL-36 antibodies of the present disclosure using and/or adapting methods and techniques known in the art with those described herein. For example, the use of phage display library generation and screening to prepare a wide-range of affinity matured variants of the anti-IL-36 antibodies of the present disclosure is described in the Examples.

[0182] 6. Multispecific Antibodies

[0183] In some embodiments, the anti-IL-36 antibody of the present disclosure is a multispecific antibody, e.g., a trispecific or bispecific antibody. In some embodiments, the multispecific antibody is a monoclonal antibody having at least two different binding sites, each with a binding specificity for a different antigen, at least one of which specifically binds IL-36. Generally, it is contemplated that the binding specificities of any of the anti-IL-36 antibodies disclosed herein can be incorporated into a multispecific antibody useful for treating an IL-36 mediated disease. For example, in some embodiments, at least one of binding site of multispecific antibody specifically binds IL-36 (e.g., IL-36a, IL-36β, and/or IL-36γ) and another binding site of the multispecific antibody binds to a different antigen related to treatment of an IL-36 mediated disease.

[0184] In some embodiments, as described elsewhere herein, a multispecific antibody is contemplated that binds to each of human IL-36α, IL-36β, and IL-36γ with a high binding affinity (e.g., 3 nM or less). Such binding affinities can be measured as the equilibrium dissociation constant (K_{D}) to a hu-IL-36α of SEQ ID NO:1, a hu-IL-36β of SEQ ID NO:2, and a hu-IL-36γ of SEQ ID NO:3. It is further contemplated, that in some embodiments, the multispecific antibody can comprise a specificity for IL-36α and/or IL-36γ in one arm, and a specificity for IL-36β in the other arm.

[0185] Techniques for making multispecific antibodies include, but are not limited to, recombinant co-expression of two immunoglobulin heavy chain-light chain pairs having different specificities (see e.g., Milstein and Cuello, Nature 305: 537 (1983), WO 93/08829, and Traunecker et al., EMBO J, 10: 3655 (1991)), “Knob-in-hole” engineering can also be used (see, e.g., U.S. Pat. No. 5,731,168).

[0186] Multispecific antibodies can also be made by engineering “electrostatic steering” effects that favor formation of Fc-heterodimeric antibody molecules rather than homodimers (WO 2009/089004A1); cross-linking two or more antibodies or fragments (see, e.g., U.S. Pat. No. 4,676,980, and Brennan et al., Science, 229: 81 (1985)); using leucine zippers to produce bispecific antibodies (see, e.g., Kostelny et al., J. Immunol, 148(5): 1547-1553 (1992)); using “diabody” technology for making bispecific antibody fragments (see, e.g., Hollinger et al., Proc. Natl. Acad. Sci. USA, 90:6444-6448 (1993)); using single-chain Fv (scFv) dimers (see, e.g. Gruber et al., J. Immunol, 152:5368 (1994)); or tri-specific antibodies (see e.g., Tutt et al., J. Immunol. 147: 60 (1991).

[0187] It is contemplated that any of the anti-IL-36 antibodies of the present disclosure can be prepared as multispecific antibodies using the methods and techniques known in the art and/or described herein.

[0188] In some embodiments of the present disclosure, a multispecific IL-36 antibody is contemplated that comprises separate binding specificities for one or more of the distinct IL-36 cytokines, IL-36β, and IL-36γ. For example, the multispecific antibody can bind to IL-36α, IL-36β, and IL-36γ with an affinity of 3 nM or less, and/or decrease an intracellular signal stimulated by IL-36α, IL-36β, and IL-36γ by at least 90%, and/or has an IC₅₀ of 10 nM or less at an IL-36α, IL-36β, and/or IL-36γ concentration of about EC₅₀. As described elsewhere herein, human IL-36 antibodies were isolated having high-affinity for IL-36α and IL-36γ, but lower affinity for IL-36β, and others were isolated having high-affinity for IL-36β, but lower affinity for IL-36α and IL-36γ. These specificities for these different human IL-36 cytokines were affinity matured and combined in a single multispecific IL-36 antibody. Accordingly, in some embodiments, the present disclosure provides a multispecific anti-IL-36 antibody with a target specificity and high affinity (e.g., 1 nM or less) for IL-36α/IL-36γ in one arm, and a target specificity and high affinity (e.g., 1 nM or less) for IL-363 in the other arm. The preparation and use of such a multispecific anti-IL-36 antibody is detailed in the Examples.

[0189] 7. Antibody Variants

[0190] In some embodiments, variants of the anti-IL-36 antibody of the present disclosure are also contemplated. For example, antibodies with improved binding affinity and/or other biological properties of the antibody may be prepared by introducing appropriate modifications into the nucleotide sequence encoding the antibody, or by peptide synthesis, Such modifications include, for example, deletions from, and/or insertions into and/or substitutions of residues within the amino acid sequences of the antibody. Any combination of deletion, insertion, and substitution can be made to arrive at the final construct, provided that the final construct possesses the desired characteristic of IL-36 antigen binding. It is contemplated that a wide-range of variants of the anti-IL-36 antibodies of the present disclosure can be prepared using the methods and techniques known in the art and/or described herein, including but not limited to: (i) amino acid substitution, insertion and/or deletion variants; (ii) glycosylation variants; (iii) Fc region variants; (iv) cysteine engineered variants; and (v) derivatized variants.

[0191] The Examples, Table 2, and the Sequence Listing of the present disclosure provide a large number of exemplary variants of two specific anti-IL-36 antibodies, “mAb2,” and “mAb6_2.” The exemplified variants comprise one or more of the following: a range of single, double, triple amino acid substitutions in HVR-H1, HVR-H2, and HVR-H3 that increase specific affinity for IL-36α/γ, or IL-36β, and/or cell-based blocking activities related to IL-36 mediated signaling; an Fc region variant that confers in effectorless function (e.g., N297G); and heavy chain substitutions resulting in “knob” and “hole” structures that allow for multispecific antibody formation. For example, the heavy chain antibody sequences disclosed in Table 2 can further include a carboxy-terminal lysine (i.e., “C-terminal Lys” or “C-terminal K”), YTE mutations at positions 252, 254, and 256 (i.e., M252Y/S254T/T256E), or both a C-terminal K and YTE mutations. Such variants of the heavy chain sequences of SEQ ID NOs: 170-241, 243-245, 248-250 are provided in Table 2 (and the accompanying Sequence Listing) as SEQ ID NO: 518-751.

[0192] A. Substitution, Insertion, and Deletion Variants

[0193] In some embodiments, anti-IL-36 antibody variants having one or more amino acid substitutions in addition to those described herein are provided, Sites for mutagenesis can include the HVRs and FRs. Typical “conservative” amino acid substitutions and/or substitutions based on common side-chain class or properties are well-known in the art and can be used in the embodiments of the present disclosure. The present disclosure also contemplates variants based on non-conservative amino acid substitutions in which a member of one of amino acid side chain class is exchanged for an amino acid from another class.

[0194] Amino acid side chains are typically grouped according to the following classes or common properties: (1) hydrophobic: Met, Ala, Val, Leu, Ile, Norleucine; (2) neutral hydrophilic: Cys, Ser, Thr, Asn, Gln; (3) acidic: Asp, Glu; (4) basic: His, Lys, Arg; (5) chain orientation influencing; Gly, Pro; and (6) aromatic: Trp, Tyr, Phe.

[0195] Techniques are well-known in the art for amino acid substitution into an antibody and subsequent screening for desired function, e.g., retained/improved antigen binding, decreased immunogenicity, or improved ADCC or CDC.

[0196] Amino acid substitution variants can include substituting one or more hypeivariable region residues of a parent antibody (e.g., a humanized or human antibody). Generally, the resulting variant(s) selected for further study will have modifications in certain biological properties (e.g., increased affinity, reduced immunogenicity) relative to the parent antibody and/or will have substantially retained certain biological properties of the parent antibody. An exemplary substitutional variant is an affinity matured antibody, which may be conveniently generated, e.g., using phage display-based affinity maturation techniques such as those described in the Examples herein. Briefly, one or more HVR residues are mutated and the variant antibodies displayed on phage and screened for a particular biological activity (e.g., binding affinity).

[0197] A useful method for identifying residues or regions of an antibody that may be targeted for mutagenesis is “alanine scanning mutagenesis” (see e.g., Cunningham and Wells (1989) Science, 244: 1081-1085). In this method, a residue or group of target residues (e.g., charged residues such as Arg, Asp, His, Lys, and Glu) are identified and replaced by a neutral or negatively charged amino acid (e.g., Ala or polyalanine) to determine whether the interaction of the antibody with antigen is affected. Further substitutions may be introduced at the amino acid locations demonstrating functional sensitivity to the initial substitutions. Alternatively, or additionally, a crystal structure of an antigen-antibody complex to identify contact points between the antibody and antigen can be determined. Such contact residues and neighboring residues may be targeted or eliminated as candidates for substitution, Variants may be screened to determine whether they contain the desired properties.

[0198] Amino acid sequence insertions include amino- and/or carboxyl-terminal fusions ranging in length from one residue to polypeptides containing a hundred or more residues, as well as intra-sequence insertions of single or multiple amino acid residues. Examples of terminal insertions include an antibody with an N-terminal methionyl residue. Other insertional variants of the antibody molecule include the fusion to the N- or C-terminus of the antibody to an enzyme or a polypeptide which increases the serum half-life of the antibody.

[0199] Substitutions can be made in HVRs to improve antibody affinity. Such alterations may be made in “hotspots,” i.e., residues encoded by codons that undergo mutation at high frequency during the somatic maturation process (see, e.g., Chowdhury, Methods Mol. Biol, 207: 179-196 (2008)) with the resulting variant V_{H} or V_{L} being tested for binding affinity. In one embodiment, affinity maturation can be carried out by constructing and re-selecting from secondary libraries (see e.g., in Hoogenboom et al., Methods in Molecular Biology 178: 1-37 (O'Brien et al., ed., Human Press, Totowa, N.J., (2001).) Another method to introduce diversity involves HVR-directed approaches, in which several HVR residues (e.g., 4-6 residues at a time) are randomized. HVR residues involved in antigen binding may be specifically identified, e.g., using alanine scanning mutagenesis or modeling. CDR-H3 and CDR-L3 in particular are often targeted.

[0200] In some embodiments, substitutions, insertions, or deletions may occur within one or more HVRs so long as such alterations do not substantially reduce the ability of the antibody to bind antigen. For example, conservative alterations (e.g., conservative substitutions as provided herein) that do not substantially reduce binding affinity may be made in HVRs. Such alterations may be outside of HVR “hotspots.” In some embodiments of the variant V_{H} and V_{L} sequences provided above, each HVR either is unaltered, or contains no more than one, two or three amino acid substitutions.

[0201] B. Glycosylation Variants

[0202] In some embodiments, the anti-IL-36 antibody of the present disclosure is altered to increase or decrease the extent to which the antibody is glycosylated. Addition or deletion of glycosylation sites to an antibody can be carried out by altering the amino acid sequence such that one or more glycosylation sites is created or removed.

[0203] In embodiments where the antibody comprises an Fc region, the carbohydrate attached to the Fc region can be altered. Typically, native antibodies produced by mammalian cells comprise a branched, biantennary oligosaccharide attached by an N-linkage to Asn297 of the CH2 domain of the Fc region (see, e.g., Wright et al. TIBTECH 15:26-32 (1997)). The oligosaccharide may include various carbohydrates, such as mannose, N-acetyl glucosamine (GlcNAc), galactose, and sialic acid, as well as, a fucose attached to a GlcNAc in the “stem” of the bi-antennary oligosaccharide structure. In some embodiments, the modifications of the oligosaccharide of an Fc region of an antibody can create a variant with certain improved properties.

[0204] In some embodiments, the anti-IL-36 antibody of the present disclosure can be a variant of a parent antibody, wherein the variant comprises a carbohydrate structure that lacks fucose attached (directly or indirectly) to an Fc region. For example, the amount of fucose in such antibody may be from about 1% to about 80%, from about 1% to about 65%, from about 5% to about 65%, or from about 20% to about 40%. The amount of fucose can be determined by calculating the average amount of fucose within the sugar chain at Asn297, relative to the sum of all glyco-structures attached to Asn 297 (e.g., complex, hybrid and high mannose structures) as measured by MALDI-TOF mass spectrometry (see e.g., WO 2008/077546). Asn297 refers to the asparagine residue located at about position 297 in the Fc region (Eu numbering of Fc region residues); however, Asn297 may also be located about ±3 amino acids upstream or downstream of position 297, i.e., between positions 294 and 300, due to minor sequence variations in antibodies.

[0205] In some embodiments, the fucosylation variants can have improved ADCC function. See, e.g., US Patent Publication Nos. US 2003/0157108, or US 2004/0093621. Examples of “defucosylated” or “fucose-deficient” antibodies and associated methods for preparing them are disclosed in e.g., US2003/0157108; US2003/0115614; US2002/0164328; US2004/0093621; US2004/0132140; US2004/0110704; US2004/0110282; US2004/0109865; WO2000/61739; WO2001/29246; WO2003/085119; WO2003/084570; WO2005/035586; WO2005/035778; WO2005/053742; WO2002/031140; Okazaki et al. J. Mol. Biol. 336: 1239-1249 (2004); Yamane-Ohnuki et al. Biotech. Bioeng, 87; 614 (2004).

[0206] Cell lines useful for producing defucosylated antibodies include Led 3 CHO cells deficient in protein fucosylation (see e.g., Ripka et al. Arch. Biochem. Biophys. 249; 533-545 (1986); US2003/0157108, and WO2004/056312), and knockout cell lines, such as alpha-1,6-fucosyltransferase gene, FUT8, knockout CHO cells (see, e.g., Yamane-Ohnuki et al. Biotech. Bioeng. 87: 614 (2004); Kanda, Y. et al., Biotechnol. Bioeng., 94(4):680-688 (2006); and WO2003/085107).

[0207] C. Fc Region Variants

[0208] In some embodiments, an anti-IL-36 antibody of the present disclosure can comprise one or more amino acid modifications in the Fc region (i.e., an Fc region variant). The Fc region variant may comprise a human Fc region sequence (e.g., a human IgG1, IgG2, IgG3, or IgG4 Fc region) comprising an amino acid substitution at one or more amino acid residue positions. A wide range of Fc region variants known in the art that are useful with the anti-IL-36 antibodies of the present disclosure are described below.

[0209] In some embodiments, the anti-IL-36 antibody is an Fc region variant which has altered effector function. In some embodiments, the antibody with altered effector function possesses some (but not all of) the effector functions, decreased effector function, or none of the effector functions (e.g., effectorless) of the parent antibody. Effectorless Fc region variants are more desirable for certain applications where effector function (such as ADCC) is unnecessary or deleterious, and/or in vivo half-life of the antibody is important.

[0210] Fc region variant antibodies with reduced effector function, or which are effectorless, can include an amino acid substitution at one or more of the following Fc region positions; 238, 265, 269, 270, 297, 327 and 329. (see, e.g., U.S. Pat. No. 6,737,056). Such Fc region variants can include amino acid substitutions at two or more of positions 265, 269, 270, 297 and 327. Such Fc region variants can also include substitutions of both residues 265 and 297 to alanine (see e.g., U.S. Pat. No. 7,332,581). As disclosed in the Examples and elsewhere herein, in some embodiments, the anti-IL-36 antibodies of the present disclosure are effectorless Fc region variants. In some embodiments, the effectorless Fc region variants of the anti-IL-36 antibodies comprise the amino acid substitution N297G.

[0211] Fc region variants having improved or diminished binding to FcRs are disclosed in e.g., U.S. Pat. No. 6,737,056; WO 2004/056312: and Shields et al., J. Biol. Chem. 9(2): 6591-6604 (2001). Fc region variants having improved ADCC can comprise one or more amino acid substitutions at e.g., positions 298, 333, and/or 334 of the Fc region (based on EU numbering). Fc region variants having altered (i.e., either improved or diminished) Clq binding and/or Complement Dependent Cytotoxicity (CDC), as described in e.g., U.S. Pat. No. 6,194,551, WO99/51642, and Idusogie et al., J. Immunol. 164: 4178-4184 (2000). Fc region variants with increased half-lives and improved binding to the neonatal Fc receptor (FcRn) are disclosed in e.g., US2005/0014934A1 (Hinton et al.), Such Fc region variants comprise amino acid substitutions at one or more of positions: 238, 256, 265, 272, 286, 303, 305, 307, 311, 312, 317, 340, 356, 360, 362, 376, 378, 380, 382, 413, 424, and 434. Other Fc region variants with increased half-lives include the set of YTE mutations at positions 252, 254, and 256 (i.e., M252Y/S254T/T256E) described in e.g., U.S. Pat. No. 7,658,921 B2 (Dall'Acqua et al.). Other examples of Fc region variants can be found in e.g., U.S. Pat. Nos. 5,648,260 and 5,624,821; and WO94/29351.

[0212] Generally, in vitro and/or in vivo cytotoxicity assays can be carried out to confirm the reduction/depletion of CDC and/or ADCC activities in an Fc region variant. For example, Fc receptor (FcR) binding assays can be conducted to ensure that the antibody lacks FcγR binding (hence likely lacking ADCC activity) but retains FcRn binding ability. The primary cells for mediating ADCC, NK cells express FcγRIII only, whereas monocytes express FcγRI, FcγRII, and FcγRIII. Non-limiting examples of in vitro assays to assess ADCC activity of a molecule of interest is described in U.S. Pat. No. 5,500,362 (see, e.g. Hellstrom, et al., Proc. Nat'l Acad. Sci. USA 83:7059-7063 (1986)) and Hellstrom, et al., Proc. Nat'l Acad, Sci. USA 82: 1499-1502 (1985); U.S. Pat. No. 5,821,337 (see Bruggemann, M. et al., J. Exp. Med. 166: 1351-1361 (1987)). Alternatively, non-radioactive assay methods may be employed (see, for example, ACTI™ nonradioactive cytotoxicity assay for flow cytometry (CellTechnology, Inc. Mountain View, Calif.; and CytoTox96® non-radioactive cytotoxicity assay (Promega, Madison, Wis.). Useful effector cells for such assays include peripheral blood mononuclear cells (PBMC) and Natural Killer (NK) cells. Alternatively, or additionally, ADCC activity of the molecule of interest may be assessed in vivo, e.g., in an animal model such as that disclosed in Clynes et al. Proc. Nat'l Acad. Sci. USA 95:652-656 (1998). Clq binding assays may also be carried out to confirm that the antibody is unable to bind Clq and hence lacks CDC activity. See, e.g., Clq and C3c binding ELISA in WO2006/029879 and WO2005/100402. To assess complement activation, a CDC assay may be performed (see, e.g., Gazzano-Santoro et al., J. Immunol. Methods 202: 163 (1996); Cragg, M. S. et al., Blood 101: 1045-1052 (2003); and Cragg, M. S. and M. J. Glennie, SW 103:2738-2743 (2004)). FcRn binding and in vivo clearance/half-life determinations can be performed using methods known in the art (see, e.g., Petkova, et al., Intl. Immunol. 18(12): 1759-1769 (2006)).

[0213] It is contemplated that a wide-range of Fc region variants of the anti-IL-36 antibodies of the present disclosure can be prepared using the methods and techniques known in the art and/or described herein. For example, the Fc region variant prepared with the N297G amino acid substitution confers effectorless function on anti-IL-36 antibodies with retention of cell-based blocking activity as described in Examples 2, 3, and 8.

[0214] D. Cysteine Engineered Variants

[0215] In some embodiments, it is contemplated that the anti-IL-36 antibody described herein can be substituted at specific non-CDR positions with cysteine residues so as to create reactive thiol groups. Such engineered “thioMAbs” can be used to conjugate the antibody to e.g., drug moieties or linker-drug moieties and thereby create immunoconjugates, as described elsewhere herein. Cysteine engineered antibodies can be generated as described in e.g., U.S. Pat. No. 7,521,541. In some embodiments, any one or more of the following antibody residues can be substituted with cysteine: V205 (Kabat numbering) of the light chain; A118 (EU numbering) of the heavy chain; and S400 (EU numbering) of the heavy chain Fc region.

[0216] E. Derivatized Variants

[0217] In some embodiments, the anti-IL-36 antibody of the present disclosure may be further modified (i.e., derivatized) with non-proteinaceous moieties. Non-proteinaceous moieties suitable for derivatization of the antibody include, but are not limited to, water soluble polymers, such as: polyethylene glycol (PEG), copolymers of ethylene glycol and propylene glycol, carboxy-methylcellulose, dextran, polyvinyl alcohol, polyvinyl pyrrolidone, poly-1, 3-dioxolane, poly-1, 3, 6-trioxane, ethylene/maleic anhydride copolymer, poly-amino acid homo-polymers or random co-polymers, and dextran or poly(n-vinyl pyrrolidone)polyethylene glycol, propropylene glycol homo-polymers, polypropylene oxide/ethylene oxide co-polymers, polyoxy-ethylated polyols (e.g., glycerol), polyvinyl alcohol, and mixtures thereof. In some embodiments, modification of the antibody can be carried out using methoxy-polyethylene glycol propionaldehyde. The polymers may be of any molecular weight and may be branched or unbranched. The number of polymers attached to the antibody may vary, and if more than one polymer is attached, they can be the same or different molecules. In general, the number and/or type of polymers used for derivatization can be determined based on considerations including, but not limited to, the particular properties or functions of the antibody, e.g., whether the antibody derivative will be used in a therapy under defined conditions.

[0218] 8. Immunoconjugates

[0219] In some embodiments, the anti-IL-36 antibody of the present disclosure can also be an immunoconjugate, wherein the immunoconjugate comprises an anti-IL-36 antibody conjugated to one or more cytotoxic agents. Suitable cytotoxic agents contemplated by the present disclosure include chemotherapeutic agents, drugs, growth inhibitory agents, toxins (e.g., protein toxins; enzymatically active toxins of bacterial, fungal, plant, or animal origin, or fragments thereof), or radioactive isotopes.

[0220] In some embodiments, the immunoconjugate is an antibody-drug conjugate (ADC) in which an anti-IL-36 antibody, as described herein, is conjugated to one or more drugs.

[0221] In some embodiments, an immunoconjugate of the present disclosure comprises an anti-IL-36 antibody as described herein conjugated to a drug or therapeutic agent for the treatment of an IL-36-mediated disease or condition.

[0222] In some embodiments, an anti-IL-36 antibody as described herein can be conjugated to an enzymatically active toxin or a fragment thereof, including but not limited to diphtheria A chain, non-binding active fragments of diphtheria toxin, exotoxin A chain (from Pseudomonas aeruginosa), ricin A chain, abrin A chain, modeccin A chain, alpha-sarcin, Aleurites fordii proteins, dianthin proteins, Phytolaca americana proteins, Momordica charantia inhibitor, curcin, crotin, Sapaonaria officinalis inhibitor, gelonin, mitogellin, restrictocin, phenomycin, enomycin, and the tricothecenes.

[0223] In some embodiments, an immunoconjugate of the present disclosure comprises an anti-IL-36 antibody as described herein conjugated to a radioactive isotope (La, a radioconjugate). A variety of radioactive isotopes are available for the production of such radioconjugates. Examples include ²¹¹At, ¹³¹I, ¹²⁵I, ⁹⁰Y, ¹⁸⁶Re, ¹⁸⁸Re, ¹⁵³Sm, ²¹²Bi, ³²P, ²¹²Pb, and radioactive isotopes of Lu. In some embodiments, the immunoconjugate may comprise a radioisotope for scintigraphic detection, or a spin label for NMR detection or MRI. Suitable radioisotopes or spin labels can include, as ¹²³I, ¹³¹I, ¹¹¹In, ¹³C, ¹⁹F, ¹⁵N, ¹⁷O, various isotopes of Gd, Mn, and Fe.

[0224] Immunoconjugates of an anti-IL-36 antibody and a cytotoxic agent, can be made using a variety of well-known bifunctional reagents and chemistries suitable for conjugating to proteins. Such reagents include but are not limited to: N-succinimidyl-3-(2-pyridyldithio) propionate (SPDP), succinimidyl-4-(N-maleimidornethyl) cyclohexane-1-carboxylate (SMCC), iminothiolane (IT), bifunctional derivatives of imidoesters (e.g., dimethyl adipimidate HQ), active esters (e.g., disuccinimidyl suberate), aldehydes (e.g., glutaraldehyde), bis-azido compounds bis-(p-azidobenzoyl)-hexanediamine), bis-diazonium derivatives (e.g., bis-(p-diazoniumbenzoyl)-ethylenediamine), diisocyanates (e.g., toluene-2,6-diisocyanate), and bis-active fluorine compounds (e.g., 1,5-difluoro-2,4-dinitrobenzene).

[0225] Reagents for preparing immunoconjugates of the present disclosure can also include commercially available “cross-linking” reagents such as: BMPS, EMCS, GMBS, HBVS, LC-SMCC, MBS, MPBH, SBAP, SIA, SIAB, SMCC, SMPB, SMPH, sulfa-EMCS, sulfa-GMBS, sulfo-KMUS, sulfo-MBS, sulfa-SIAB, sulfo-SMOG, and sulfa-SMPB, and SVSB (succinimidyl-(4-vinylsulfone)benzoate) (see e.g., Pierce Biotechnology, Inc., Rockford, Ill., U.S.A),

[0226] 9. Synthetic Antibodies

[0227] In some embodiments, the anti-IL-36 antibody of the present disclosure can be a synthetic antibody comprising a set of CDRs from an anti-IL-36 immunoglobulin (e.g., CDR-L1, etc.) grafted onto a scaffold or framework other than an immunoglobulin scaffold or framework, such as an alternative protein scaffold, or an artificial polymer scaffold.

[0228] Exemplary alternative protein scaffolds contemplated for preparation of synthetic antibodies of the present disclosure can include, but are not limited to: fibronectin, neocarzinostatin CBM4-2, lipocalins, T-cell receptor, protein-A domain (protein Z), Im9, TPR proteins, zinc finger domains, pVIII, avian pancreatic polypeptide, GCN4, WW domain Src homology domain 3, PDZ domains, TEM-1 beta-lactamase, thioredoxin, staphylococcal nuclease, PHD-finger domains, CL-2, BPTI, APPI, HPSTI, ecotin, LACI-D1, LDTI, MTI-II, scorpion toxins, insect defensin-A peptide, EETI-II, Min-23, CBD, PBP, cytochrome b-562, Ldl receptor domains, gamma-crystallin, ubiquitin, transferrin, and/or C-type lectin-like domains.

[0229] Exemplary artificial polymer (non-protein) scaffolds useful for synthetic antibodies are described in e.g., Fiedler et al., (2014) “Non-Antibody Scaffolds as Alternative Therapeutic Agents,” in Handbook of Therapeutic Antibodies (eds. S. Dübel and J. M. Reichert), Wiley-VCH Verlag GmbH & Co.; Gebauer et al., Curr. Opin. Chem. Biol., 13:245-255 (2009); Binz et al, Nat. Biotech., 23(10): 1257-1268 (2005).

[0230] IV. Recombinant Methods and Compositions

[0231] The anti-IL-36 antibody of the present disclosure can be produced using recombinant methods and materials well-known in the art of antibody production. In some embodiments, the present disclosure provides an isolated nucleic acid encoding an anti-IL-36 antibody. The nucleic acid can encode an amino acid sequence comprising the V_{L} and/or an amino acid sequence comprising the V_{H} of the antibody (e.g., the light and/or heavy chains of the antibody). In some embodiments, one or more vectors (e.g., expression vectors) comprising nucleic acid sequences encoding an anti-IL-36 antibody of the present disclosure are provided. In some embodiments, a host cell comprising nucleic acid sequences encoding an anti-IL-36 antibody of the present disclosure are provided. In one embodiment, the host cell has been transformed with a vector comprising a nucleic acid that encodes an amino acid sequence comprising the V_{L} of the antibody and an amino acid sequence comprising the V_{H} of the antibody. In another embodiment, the host cell has been transformed with a first vector comprising a nucleic acid that encodes an amino acid sequence comprising the V_{L} of the antibody and a second vector comprising a nucleic acid that encodes an amino acid sequence comprising the V_{H} of the antibody.

[0232] In some embodiments of the recombinant methods, the host cell used is a eukaryotic cell, such as a Chinese Hamster Ovary (CHO) cell, or a lymphoid cell (e.g., Y0, NS0, Sp20). In one embodiment, a method of making an anti-IL-36 antibody is provided, wherein the method comprises culturing a host cell comprising a nucleic acid encoding the antibody, as provided above, under conditions suitable for expression of the antibody, and optionally recovering the antibody from the host cell (or host cell culture medium).

[0233] Briefly, recombinant production of an anti-IL-36 antibody is carried out by isolating a nucleic acid encoding an antibody (e.g., as described herein) and inserting this nucleic acid into one or more vectors for further cloning and/or expression in a host cell. Such nucleic acids are readily isolated and sequenced using conventional procedures well-known in the art (e.g., by using oligonucleotide probes that are capable of binding specifically to genes encoding the heavy and light chains of the desired antibody). Suitable host cells and culturing methods for cloning or expressing the antibody-encoding vectors are well-known in the art and include prokaryotic or eukaryotic cells. Typically, after expression, the antibody may be isolated from cell paste in a soluble fraction and further purified. In addition to prokaryotes, eukaryotic microbes such as filamentous fungi or yeast are suitable cloning or expression hosts for antibody-encoding vectors, including fungi and yeast strains whose glycosylation pathways have been “humanized,” resulting in the production of an antibody with a partially or fully human glycosylation pattern (see e.g., Gerngross, Nat. Biotech. 22: 1409-1414 (2004), and Li et al., Nat. Biotech, 24:210-215 (2006)).

[0234] Suitable host cells for the expression of glycosylated anti-IL-36 antibodies of the present disclosure can also be derived from multicellular organisms (invertebrates and vertebrates). Examples of invertebrate cells include plant and insect cells. Numerous baculoviral strains have been identified which may be used in conjunction with insect cells, particularly for transfection of Spodoptera frugiperda cells. Plant cell cultures can also be utilized as hosts (see, e.g., U.S. Pat. Nos. 5,959,177, 6,040,498, 6,420,548, and 7,125,978.

[0235] Examples of mammalian host cell lines useful for the production of the anti-IL-36 antibodies of the present disclosure include Chinese hamster ovary (CHO) cells, including DHFR-CHO cells (see e.g., Urlaub et al., Proc. Natl. Acad. Sci. USA 77:4216 (1980)); myeloma cell lines such as Y0, NS0 and Sp2/0; monkey kidney CVI line transformed by SV40 (COS-7); human embryonic kidney line (293 or 293 cells as described, e.g., in Graham et al., J. Gen Virol. 36:59 (1977)); baby hamster kidney cells (BHK); mouse Sertoli cells (TP4 cells as described, e.g., in Mather, Biol. Reprod, 23:243-251 (1980)); monkey kidney cells (CVI); African green monkey kidney cells (VERO-76); human cervical carcinoma cells (HFLA); canine kidney cells (MDCK); buffalo rat liver cells (BRL 3A); human lung cells (W138); human liver cells (Hep G2); mouse mammary tumor (MMT 060562); TR1 cells (see e.g., in Mather et al., Annals N Y. Acad, Sci. 383:44-68 (1982) and U.S. Pat. No. 6,235,498); Medical Research Council 5 (MRC 5) cells (such as e.g., those available from ATCC and also referred to as CCL-171); and Foreskin 4 (FS4) cells (see e.g., in Vilcek et al. Ann. N. Y, Acad. Sci. 284:703-710 (1977), Gardner & Vilcek, J. Gen, Virol. 44:161-168 (1979), and Pang et al, Proc. Natl. Acad. Sci, U.S.A. 77:5341-5345 (1980)). For a general review of useful mammalian host cell lines suitable for antibody production, see, e.g., Yazaki and Wu, Methods in Molecular Biology, Vol. 248 (B. K. C. Lo, ed., Humana Press, Totowa, N.J.), pp. 255-268 (2003).

[0236] V. Pharmaceutical Compositions and Formulations of Anti-IL-36 Antibodies

[0237] The present disclosure also provides pharmaceutical compositions and pharmaceutical formulations comprising an anti-IL-36 antibody. In some embodiments, the present disclosure provides a pharmaceutical formulation comprising an anti-IL-36 antibody as described herein and a pharmaceutically acceptable carrier. In some embodiments, the anti-IL-36 antibody is the sole active agent of the pharmaceutical composition. Such pharmaceutical formulations can be prepared by mixing an anti-IL-36 antibody, having the desired degree of purity, with one or more pharmaceutically acceptable carriers. Typically, such antibody formulations can be prepared as an aqueous solution (see e.g., U.S. Pat. No. 6,171,586, and WO2006/044908) or as a lyophilized formulation (see e.g., U.S. Pat. No. 6,267,958).

[0238] It is also contemplated that the compositions and formulations comprising an anti-IL-36 antibody as disclosed herein may further contain other active ingredients (i.e., therapeutic agents) in addition to the anti-IL-36, useful for the particular indication being treated in the subject to whom the formulation is administered. Preferably, any additional therapeutic agent has activity complementary to that of the anti-IL-36 antibody activity and the activities do not adversely affect each other. Accordingly, in some embodiments, the disclosure provides a pharmaceutical composition comprising an anti-IL-36 antibody as disclosed herein, and a pharmaceutically acceptable carrier, and further comprises a therapeutic agent useful for treatment of an IL-36-mediated disease or condition. In some embodiments, for example wherein the disease indication is cancer the therapeutic agent is a chemotherapeutic agent appropriate for the particular cancer. In some embodiments, the further therapeutic agent in the composition is an antagonist of an IL-1, IL-33, IL-36 signaling pathway.

[0239] In some embodiments, the compositions or formulations of the present disclosure comprise an anti-IL-36 antibody as the sole active agent, wherein the anti-IL-36 antibody is a multispecific antibody that binds to each of human IL-36α, IL-36β, and IL-36γ with a binding affinity of 3 nM or less, optionally, wherein the binding affinity is measured by equilibrium dissociation constant (K_{D}) to a hu-IL-36α of SEQ ID NO:1, a hu-IL-36β of SEQ ID NO:2, and a hu-IL-36γ of SEQ ID NO:3. In some embodiments, the multispecific antibody comprises a specificity for IL-36α and/or IL-36γ in one arm, and a specificity for IL-36β in the other arm; optionally, wherein one arm binds to hu-IL-36α and hu-IL-36-γ with a binding affinity of 1×10⁻⁹ M or less, 1×10⁻¹⁰ M or less, or 1×10⁻¹¹M or less, and the other arm binds to hu-IL-36-β with a binding affinity of 1×10⁻⁹M or less, 1×10⁻¹⁰ M or less, or 1×10⁻¹¹ M or less.

[0240] In some embodiments, the compositions or formulations of the present disclosure comprise a single multispecific antibody that binds to each of human IL-36α, IL-36β, and IL-36γ with a binding affinity of 3 nM or less, and does not include any other anti-IL-36 antibody, or any other antibody capable of binding IL-36.

[0241] Pharmaceutically acceptable carriers are generally non-toxic to recipients at the dosages and concentrations employed. A wide range of such pharmaceutically acceptable carriers are well-known in the art (see e.g., Remington's Pharmaceutical Sciences 16th edition, Osol, A. Ed. (1980)). Exemplary pharmaceutically acceptable carriers useful in the formulations of the present disclosure can include, but are not limited to: buffers such as phosphate, citrate, and other organic acids; antioxidants including ascorbic acid and methionine; preservatives (such as octadecyldirnethylbenzyl ammonium chloride; hexamethonium chloride; benzalkonium chloride; benzethonium chloride; phenol, butyl or benzyl alcohol; alkyl parabens such as methyl or propyl paraben; catechol; resorcinol; cyclohexanol; 3-pentanol; and m-cresol); low molecular weight (less than about 10 residues) polypeptides; proteins, such as serum albumin, gelatin, or immunoglobulins; hydrophilic polymers such as polyvinylpyrrolidone; amino acids such as glycine, glutamine, asparagine, histidine, arginine, or lysine; monosaccharides, disaccharides, and other carbohydrates including glucose, mannose, or dextrins; chelating agents such as EDTA; sugars such as sucrose, mannitol, trehalose or sorbitol; salt-forming counter-ions such as sodium; metal complexes (e.g., Zn— protein complexes); and/or non-ionic surfactants such as polyethylene glycol (PEG).

[0242] Pharmaceutically acceptable carriers useful in the formulations of the present disclosure can also include interstitial drug dispersion agents, such as soluble neutral-active hyaluronidase glycoproteins (sHASEGP) (see e.g., US Pat. Publ. Nos. 2005/0260186 and 2006/0104968), such as human soluble PH-20 hyaluronidase glycoproteins (e.g., rHuPH20 or HYLENEX®, Baxter International, Inc.).

[0243] Additional therapeutic agents and active ingredients may be entrapped in microcapsules prepared, for example, by coacervation techniques or by interfacial polymerization, for example, hydroxymethylcellulose or gelatin-microcapsules and poly-(methylmethacylate) microcapsules, respectively, in colloidal drug delivery systems (for example, liposomes, albumin microspheres, microemulsions, nano-particles and nanocapsules) or in macroemulsions. Such techniques are disclosed in Remington's Pharmaceutical Sciences 16th edition, Osol, A. Ed. (1980).

[0244] In some embodiments, the formulation can be a sustained-release preparation of the antibody and/or other active ingredients. Suitable examples of sustained-release preparations include semipermeable matrices of solid hydrophobic polymers containing the antibody, which matrices are in the form of shaped articles, e.g. films, or microcapsules.

[0245] Typically, the formulations of the present disclosure to be administered to a subject are sterile. Sterile formulations may be readily prepared using well-known techniques, e.g., by filtration through sterile filtration membranes.

[0246] IV. Uses and Methods of Treatment

[0247] It is contemplated that any of the compositions or formulations comprising an anti-IL-36 antibody of the present disclosure can be used for any methods or uses, such as in therapeutic methods, that utilize their ability to specifically bind to IL-36 and/or block the activity of IL-36, particularly blocking the ability of IL-36 to mediate intracellular signaling by the cytokines IL-36α, IL-36β, and/or IL-36γ. The intracellular signaling pathways mediated by IL-36 include at least the signaling pathways stimulated by the cytokine agonists IL-36α, IL-36β, and/or IL-36γ. Inhibition of the IL-36-mediated signaling pathways can be assayed in vitro using known cell-based blocking assays including the HEK-BLUE™ reporter cell assays and primary cell-based blocking assays described in the Examples of the present disclosure.

[0248] An IL-36 mediated disease can include any disease or condition associated with the aberrant function of the IL-1 family of cytokines for which IL-36R acts as a receptor including IL-36α, IL-36β, and/or IL-36γ. In some cases, such aberrant function is associated with elevated levels of IL-36α, IL-36β, and/or IL-36γ in bodily fluids or tissue, and can include, for example, levels that exceed those normally found in a particular cell or tissue or can be any detectable level in a cell or tissue that normally does not express these cytokines. Typically, IL-36 mediated conditions or diseases exhibit the following characteristics: (1) pathologies associated with the condition or disease can be experimentally induced in animals by administration of IL-36α, IL-36β, and/or IL-36γ, and/or by up-regulation of expression of IL-36α, IL-36β, and/or IL-36γ; and (2) pathologies associated with the condition or disease generated in experimental animal models can be inhibited by agents that are known to inhibit the action of IL-36α, IL-36β, and/or IL-36γ.

[0249] IL-36α, IL-36β, and/or IL-36γ are known to be pro-inflammatory cytokines, however, the aberrant function of the IL-36 signaling pathways stimulated by these cytokines as mediated by IL-36R, are known to be associated with a wide range of diseases and conditions generally including but not limited to inflammatory diseases, autoimmune diseases, respiratory diseases, metabolic disorders, infections, and cancers. For example, the range of conditions and diseases associated with aberrant function of IL-36 signaling, include but are not limited to: acute generalized exanthematous pustulosis (AGEP), chronic obstructive pulmonary disease (COPD), childhood pustular dermatosis, Crohn's disease, eczema, generalized pustular psoriasis (GPP), inflammatory bowel disease (IBD), palmoplantar pustular psoriasis (PPP), psoriasis, psoriatic arthritis, TNF-induced psoriasis form skin lesions in Crohn's patients, Sjogren's syndrome, systemic lupus erythematosus (SLE), ulcerative colitis, and uveitis.

[0250] Agents that target the IL-36 signaling pathways by blocking IL-36R are in clinical development for the treatment of a range of diseases and conditions, including but not limited to the following: GPP, PPP, and ulcerative colitis.

[0251] It is contemplated that any of the compositions or formulations comprising an anti-IL-36 antibody of the present disclosure can be used in a method or use for the treatment of any of the above-listed diseases or conditions associated with aberrant function of the IL-36 signaling pathway. Generally, these conditions and diseases include but are not limited to inflammatory diseases, autoimmune diseases, respiratory diseases, metabolic disorders, infections, and cancers.

[0252] Accordingly, in some embodiments, the compositions or formulations comprising an anti-IL-36 antibody of the present disclosure can be used in a method, therapy, medicament, diagnostic, or use for use in the treatment of a condition or disease selected from acne due to epidermal growth factor receptor inhibitors, acne and suppurative hidradenitis (PASH), acute generalized exanthematous pustulosis (AGEP), amicrobial pustulosis of the folds, amicrobial pustulosis of the scalp/leg, amicrobial subcorneal pustulosis, aseptic abscess syndrome, Behçet's disease, bowel bypass syndrome, chronic obstructive pulmonary disease (COPD), childhood pustular dermatosis, Crohn's disease, deficiency of the interleukin-1 receptor antagonist (DIRA), deficiency of interleukin-36 receptor antagonist (DITRA), eczema, generalized pustular psoriasis (GPP), erythema elevatum diutinum, hidradenitis suppurativa, IgA pemphigus, inflammatory bowel disease (IBD), neutrophilic panniculitis, palmoplantar pustular psoriasis (PPP), psoriasis, psoriatic arthritis, pustular psoriasis (DIRA, DITRA), pyoderma gangrenosum, pyogenic arthritis pyoderma gangrenosum and acne (PAPA), pyogenic arthritis pyoderma gangrenosum acne and suppurative hidradenitis (PAPASH), rheumatoid neutrophilic dermatosis, synovitis acne pustulosis hyperostosis and osteitis (SAPHO), TNF-induced psoriasis form skin lesions in Crohn's patients, Sjogren's syndrome, Sweet's syndrome, systemic lupus erythematosus (SLE), ulcerative colitis, and uveitis.

[0253] As disclosed herein, including in the Examples below, the anti-IL-36 antibodies of the present disclosure have the ability to decrease, inhibit, and/or block intracellular signaling mediated by IL-36. Accordingly, in some embodiments, the present disclosure provides a method of treating a IL-36-mediated disease or condition in a subject, the method comprising administering to the subject a therapeutically effective amount of an anti-IL-36 antibody of the present disclosure or administering to a subject in need thereof a therapeutically effective amount of a pharmaceutical composition comprising an anti-IL-36 antibody of the present disclosure and a pharmaceutically acceptable carrier.

[0254] As disclosed elsewhere herein, the anti-IL-36 antibodies of the present disclosure have the ability to decrease, inhibit, and/or block the IL-36 signaling pathways. Accordingly, the present disclosure also provides methods of treating diseases and conditions responsive to a decrease, inhibition, and/or blocking of the IL-36 signaling pathways.

[0255] Additionally, the anti-IL-36 antibodies of the present disclosure have the ability to decrease, inhibit, and/or block intracellular signaling stimulated by the agonists IL-36α, IL-36β, and/or IL-36γ. Accordingly, the present disclosure also provides methods of treating diseases and conditions responsive to a decrease, inhibition, and/or blocking of intracellular signaling stimulated by the agonists IL-36α, IL-36β, and/or IL-36γ.

[0256] The IL-1 family cytokines, including the IL-36 cytokines, IL-36α, IL-36β, and/or IL-36γ, are involved in inflammatory immune responses that affect tumor formation and the development of many forms of cancer. Accordingly, in some embodiments, the present disclosure provides a method of treating cancer in a subject, the method comprising administering to the subject in need thereof a therapeutically effective amount of an anti-IL-36 antibody of the present disclosure or administering to a subject a therapeutically effective amount of a pharmaceutical composition comprising an anti-IL-36 antibody of the present disclosure and a pharmaceutically acceptable carrier.

[0257] The IL-36 signaling pathways have been associated with psoriasis. Accordingly, in some embodiments, the present disclosure provides a method of treating psoriasis in a subject, the method comprising administering to the subject in need thereof a therapeutically effective amount of an anti-IL-36 antibody of the present disclosure or administering to a subject a therapeutically effective amount of a pharmaceutical composition comprising an anti-IL-36 antibody of the present disclosure and a pharmaceutically acceptable carrier.

[0258] In some embodiments, the present disclosure provides a method of treating and/or preventing a IL-36-mediated disease, a IL-36 signaling pathway mediated disease, and/or a disease mediated by intracellular signaling stimulated by the agonists IL-36α, IL-36β, and/or IL-36γ. In such method of treatment embodiments, the method comprises administering to a subject in need thereof, a therapeutically effective amount of an anti-IL-36 antibody, or a composition or pharmaceutical formulation comprising an anti-IL-36 antibody as described herein. Administration of the antibody, composition, or pharmaceutical formulation in accordance with the method of treatment provides an antibody-induced therapeutic effect that protects the subject from and/or treats the progression of an IL-36-mediated disease in a subject.

[0259] In some embodiments, the anti-IL-36 antibody is the sole active agent that is administered to the subject. In some embodiments wherein the anti-IL-36 antibody is the sole active agent, the anti-IL-36 antibody is a multispecific antibody that binds to each of human IL-36α, IL-36β, and IL-36γ with a binding affinity of 3 nM or less. Such a method that uses a single anti-IL-36 antibody as the sole active agent provides an advantage over methods that require the use of multiple anti-IL-36 antibodies (e.g., a composition comprising a mixture of two or more different antibodies that bind to IL-36α, IL-36-β, and/or IL-36γ), and/or other antibodies that bind to other antigens. The ability to bind all three IL-36 antigens with a single antibody allows for administration of a single composition or formulation, including a single dose or multiple doses of a single composition or formulation, to the subject. Additionally, it is contemplated that the number of doses administered using the multispecific antibody is fewer that when administering multiple different anti-IL-36 antibodies or mixtures of anti-IL-36 and/or other antibodies.

[0260] In some embodiments, the method of treatment can further comprise administration of one or more additional therapeutic agents or treatments known to those of skill in the art to prevent and/or treat the IL-36-mediated disease or condition. Such methods comprising administration of one or more additional agents can encompass combined administration (where two or more therapeutic agents are included in the same or separate formulations), and separate administration, in which case, administration of the antibody composition or formulation can occur prior to, simultaneously, and/or following, administration of the additional therapeutic agent.

[0261] In some embodiments of the methods of treatment of the present disclosure, the anti-IL-36 antibody or pharmaceutical formulation comprising an anti-IL-36 antibody is administered to a subject by any mode of administration that delivers the agent systemically, or to a desired target tissue. Systemic administration generally refers to any mode of administration of the antibody into a subject at a site other than directly into the desired target site, tissue, or organ, such that the antibody or formulation thereof enters the subject's circulatory system and, thus, is subject to metabolism and other like processes.

[0262] Accordingly, modes of administration useful in the methods of treatment of the present disclosure can include, but are not limited to, injection, infusion, instillation, and inhalation. Administration by injection can include intravenous, intramuscular, intraarterial, intrathecal, intraventricular, intracapsular, intraorbital, intracardiac, intradermal, intraperitoneal, transtracheal, subcutaneous, subcuticular, intraarticular, subcapsular, subarachnoid, intraspinal, intracerebro spinal, and intrasternal injection and infusion.

[0263] In some embodiments, a pharmaceutical formulation of the anti-IL-36 antibody is formulated such that the antibody is protected from inactivation in the gut. Accordingly, the method of treatments can comprise oral administration of the formulation.

[0264] In some embodiments, use of the compositions or formulations comprising an anti-IL-36 antibody of the present disclosure as a medicament are also provided. Additionally, in some embodiments, the present disclosure also provides for the use of a composition or a formulation comprising an anti-IL-36 antibody in the manufacture or preparation of a medicament, particularly a medicament for treating, preventing or inhibiting an IL-36-mediated disease. In a further embodiment, the medicament is for use in a method for treating, preventing or inhibiting an IL-36-mediated disease comprising administering to an individual having an IL-36-mediated disease an effective amount of the medicament.

[0265] In some embodiments, the compositions and formulations useful as a medicament or in the preparation of a medicament comprise an anti-IL-36 antibody as the sole active agent. In some embodiments, the anti-IL-36 antibody useful as a medicament or in the preparation of a medicament is a multispecific antibody that binds to each of human IL-36α, IL-36β, and IL-36γ with a binding affinity of 3 nM or less. In such embodiments, the use of a single, multispecific, anti-IL-36 antibody as the sole active agent in a medicament, or in the preparation of a medicament, provides a distinct advantage over uses that require multiple anti-IL-36, or other antibodies. The use of a single multispecific anti-IL-36 antibody comprising binding specificities for IL-36α, IL-36β, and IL-36γ allows for simplified uses because only a single active agent is included in the composition or formulation is used.

[0266] In certain embodiments, the medicament further comprises an effective amount of at least one additional therapeutic agent, or treatment.

[0267] In a further embodiment, the medicament is for use in treating, inhibiting or preventing an IL-36-mediated disease in a subject comprising administering to the subject an amount effective of the medicament to treat, inhibit or prevent the IL-36-mediated disease.

[0268] For the prevention or treatment of a IL-36-mediated disease or condition, the appropriate dosage of the anti-IL-36 antibody contained in the compositions and formulations of the present disclosure (when used alone or in combination with one or more other additional therapeutic agents) will depend on the specific disease or condition being treated, the severity and course of the disease, whether the antibody is administered for preventive or therapeutic purposes, the previous therapy administered to the patient, the patient's clinical history and response to the antibody, and the discretion of the attending physician. The anti-IL-36 antibody included in the compositions and formulations described herein, can be suitably administered to the patient at one time, or over a series of treatments. Various dosing schedules including but not limited to single or multiple administrations over various time-points, bolus administration, and pulse infusion are contemplated herein.

[0269] Depending on the type and severity of the disease, about 1 μg/kg to 15 mg/kg of anti-IL-36 antibody in a formulation of the present disclosure is an initial candidate dosage for administration to a human subject, whether, for example, by one or more separate administrations, or by continuous infusion, Generally, the administered dosage of the antibody would be in the range from about 0.05 mg/kg to about 10 mg/kg. In some embodiments, one or more doses of about 0.5 mg/kg, 2.0 mg/kg, 4.0 mg/kg or 10 mg/kg (or any combination thereof) may be administered to a patient.

[0270] Dosage administration can be maintained over several days or longer, depending on the condition of the subject, for example, administration can continue until the IL-36-mediated disease is sufficiently treated, as determined by methods known in the art. In some embodiments, an initial higher loading dose may be administered, followed by one or more lower doses. However, other dosage regimens may be useful. The progress of the therapeutic effect of dosage administration can be monitored by conventional techniques and assays.

[0271] Accordingly, in some embodiments of the methods of the present disclosure, the administration of the anti-IL-36 antibody comprises a daily dosage from about 1 mg/kg to about 100 mg/kg. In some embodiments, the dosage of anti-IL-36 antibody comprises a daily dosage of at least about 1 mg/kg, at least about 5 mg/kg, at least about 10 mg/kg, at least about 20 mg/kg, or at least about 30 mg/kg.

[0272] Additionally, the anti-IL-36 antibodies of the present disclosure may be used in assay methods for the detection of IL-36. Due to their ability to bind human IL-36 with high affinity, the anti-IL-36 antibodies disclosed herein are appropriate for a wide range of assay methods and formats. It is contemplated that the anti-IL-36 antibodies can be employed in any known assay method, such as competitive binding assays, direct and indirect sandwich assays, immunoprecipitation assays and enzyme-linked immunosorbent assays (ELISA) (See, Sola, 1987, Monoclonal Antibodies: A Manual of Techniques, pp. 147-158, CRC Press, Inc.) for the detection and quantitation of IL-36. Accordingly, in some embodiments, the present disclosure provides a method for detecting the level of IL-36 in a biological sample, the method comprising the step of contacting the sample with an anti-IL-36 antibody as disclosed herein. Further, in some embodiments, it is contemplated that the method of detecting the level of IL-36 in a biological sample can be used for detecting and/or diagnosing an IL-36-mediated condition or disease in a biological sample, e.g., from a human subject.

### EXAMPLES

[0273] Various features and embodiments of the disclosure are illustrated in the following representative examples, which are intended to be illustrative, and not limiting. Those skilled in the art will readily appreciate that the specific examples are only illustrative of the invention as described more fully in the claims which follow thereafter. Every embodiment and feature described in the application should be understood to be interchangeable and combinable with every embodiment contained within.

### Example 1: Generation of IL-36 Polypeptides

[0274] This example illustrates the preparation of the various IL-36 polypeptide constructs used as antigens in eliciting and screening the anti-IL-36 antibodies of the present disclosure.

[0275] The active, N-terminally truncated forms of human IL-36α, IL-36β, IL-36γ, IL-36Ra (hu-IL-36α, hu-IL-36β, hu-IL-36γ, hu-IL-36Ra) and cynomolgus monkey IL-36α, IL-36β, IL-36γ (cy-IL-36α, cy-IL-36β, cy-IL-36γ) were produced recombinantly based upon information in Towne et al., (2011). The amino acid sequence boundaries of the expression constructs are provided above in Table 1 and the accompanying Sequence Listing. All of the recombinant IL-36α and IL-36β polypeptide constructs had an N-terminal “12×His-SUMO” tag for purification purposes (SEQ ID NO: 8). The construct of IL-36γ had the following “12×His-TEV” N-terminal tag for purification purposes: HHHHHHHHHHHHENLYFQS (SEQ ID NO: 9). The construct of IL-36Ra had the following C-terminal “GS-TEV-GS-hulgG1Fc-FLAG” tag for purification purposes (SEQ ID NO: 12) along with an N-terminal secretion signal sequence for mammalian cell expression: MGWSCIILFLVATATGVHS (SEQ ID NO: 11). As noted elsewhere herein, for some applications, the IL-36 constructs included the following C-terminal “GS-AviTag” (IL-36-Avi) for detection or capture purposes: GGGGSGLNDIFEAQKIEWHE (SEQ ID NO: 10).

[0276] The IL-36 construct proteins were expressed in One Shot BL21(DE3) Chemically Competent E. coli (Thermo Fisher, Waltham, Mass., USA) according to the manufacturer's protocol. Standard IPTG (1 mM) induction protocols were performed in LB broth with Kanamycin (25 ug/mL) selection. Following induction, cells were grown at 25 degrees Celsius for 20-24 hours and harvested as pellets. Standard sonication procedures in lysozyme (100 ug/mL) and protease inhibitors were performed to extract soluble protein from E. coli pellets. Clarified supernatants were supplemented with 20 mM imidazole pH 7.5 and applied to HisTrap FF crude columns (GE Healthcare, Chicago, Ill., USA) equilibrated in 20 mM Tris-HCl, 150 mM NaCl (TBS), 20 mM imidazole pH 7.5. Proteins were eluted with a 10 CV gradient to 100% TBS, 500 mM imidazole pH 7.5. Mature forms of IL-36 protein constructs were generated after cleaving N-terminal fusion tags with either His-SUMO protease (Thermo Fisher, Waltham, Mass., USA) or His-TEV protease (ATUM, Newark, Calif., USA) according to the manufacturer's protocol with the following modifications: SUMO protease was pre-treated with 10 mM DTT for 5 minutes and then used in reactions (˜0.02 units per μg substrate) containing TBS pH 7.5 with 10 mM DTT at 25 degrees Celsius for 18-24 hours; TEV protease was used in reactions (50 μg/mL) at 25 degrees Celsius for 2 hours. Following protease treatment, affinity purification was performed using HisTrap FF columns to remove the cleaved tags, and flow-through fractions were retained and then loaded onto Superdex 75 increase columns (GE Healthcare, Chicago, Ill., USA). Peak fractions containing monomeric protein were pooled and stored in 25 mM HEPES, 150 mM NaCl (HBS), pH 7.5, 0.02% NaN₃.

[0277] The C-terminal Fc-fused IL-36Ra protein was expressed in Expi293F cells (Thermo Fisher Scientific, Waltham, Mass., USA) according to the manufacturer's protocol. Cells were harvested after 6 days and the clarified supernatant was applied to MabSelect SuRe columns (GE Healthcare, Chicago, Ill., USA) equilibrated in TBS. Protein was eluted in 20 mM citrate pH 2.95, 150 mM NaCl (CBS) and immediately neutralized with 1/25 volume 1.5 M Tris-HCl pH 8.8. The C-terminal Fc tag was removed using His-TEV protease as previously described, followed by affinity purification using a combination of HisTrap FF and MabSelect SuRe columns to remove the purification tags and His-TEV protease. Subsequent purification of the flow-through fraction proceeded as previously described for IL-36 proteins.

[0278] For some applications IL-36 proteins were biotinylated randomly or site-specifically. For random biotinylation of IL-36 proteins, NHS-PEG4-biotin (Thermo Fisher, Waltham, Mass., USA) was used according to the manufacturer's instructions. For site-specific biotinylation of IL-36-Avi proteins, E. coli were co-transformed with plasmids expressing IL-36-Avi and BirA biotin ligase (pBirAcm plasmid from Avidity, Aurora, Colo., USA). IPTG inductions were carried out as previously described with the addition of Chloramphenicol (10 ug/mL) during the starter culture step for double-selection with the BirA gene and 50 uM d-biotin during the induction step for in-vivo biotinylation.

### Example 2: Generation of Anti-Human IL-36 Antibodies Using Yeast Display Methods, Screening and Selection for Further Characterization

[0279] A. Selection of Anti-Hu-IL-36 Antibodies by Yeast Display

[0280] Human IL-36α (BioLegend), human IL-36β (Novus) and human IL-36γ (Novus) were commercially obtained as N-terminally truncated (active) forms. For yeast selection and screening purposes, these IL-36 proteins were biotinylated using NHS-PEG4-Biotin (Pierce) or labeled with DyLight-650 using NHS-4×PEG-Dylight-650 (Thermo Scientific) according to the manufacturers' protocols aiming for a ratio of label:protein of between 1-3 to 1.

[0281] Antibodies recognizing hu-IL-36 were generated using human antibody libraries displayed on the surface of yeast (U.S. Pat. No. 10,011,829). Yeast display libraries were generated to display Fab fragments based on 5 VH, 4Vκ and one Vλ gene segments according to the methods described in U.S. Pat. No. 10,011,829, which is hereby incorporated by reference herein in its entirety. 25 sub-libraries were rationally designed in order to improve amino acid diversity in the CDRs while retaining the germline sequences in the antibody framework regions. The amino acid usage in the engineered CDRs was matched to that observed for those variable region subfamilies in a human antibody database generated from a deep sequencing dataset with over 350,000 naturally occurring human antibody clones. The methods for using the libraries to identify antibodies capable of binding hu-IL-36, including methods for amplifying the libraries or yeast cells harvested from an enrichment or sorting process and induction of antibody expression on the surface of yeast for FACS sorting with antigens, were carried out as described in U.S. Pat. No. 10,011,829.

[0282] The master human antibody library comprised of individual libraries based on different VH-Vκ or VH-Vλ combinations was split into two pools (libraries 1-13 and libraries 14-25) to enable efficient initial enrichment for clones recognizing hu-IL-36 by magnetic-activated cell sorting (MACS). The libraries were grown up to 3-fold the original library titer and induced for antibody expression by growing the yeast with induction medium containing 2% galactose at 20° C. Three rounds of MACS were performed and harvested cells from each round were amplified such that 10-fold the number of yeast cells harvested was used for the next round of MACS.

[0283] For MACS selection biotinylated hu-IL-36α, hu-IL-36β and hu-IL-36γ proteins were pooled together. In three successive rounds of MACS enrichment, each library yeast cell pool was incubated with 300 nM each of biotinylated hu-IL-36α, hu-IL-36β and hu-IL-36γ. After incubation at 4° C. with rotation for 2 hours, cells were washed and 3 mL of streptavidin-coated magnetic beads (Miltenyi Biotec, Auburn, Calif.) were added to each pool. After 1 hour incubation at 4° C. with rotation, antigen-binding cells were sorted by magnetic activated bead sorting using LS columns (Miltenyi Biotec, Auburn, Calif.). The harvested cells from the two library pools were collected, pooled, amplified 10-fold overnight and then subjected to a second MACS selection that included a pre-clearing depletion with baculovirus and streptavidin-coated beads before incubating the remaining yeast cells with 300 nM of each of the 3 biotinylated hu-IL-36 cytokines. The percent of the input pool harvested from the third round of MACS was 9.7%.

[0284] Prior to performing FACS sorting experiments to identify high-affinity yeast clones for hu-IL-36 proteins, different binding buffers were tested to minimize non-specific binding. The best binding buffer for hu-IL-36α and hu-IL-36β was PBS containing 0.5% bovine serum albumin (VWR Life Science, Radnor, Pa., USA), whereas experiments with hu-IL-36γ required PBS containing filtered, solubilized 5% dried milk (LabScientific, Highlands, N.J., USA) to minimize background binding.

[0285] FACS1 was performed using 150 nM of each PEG4-biotin-IL-36 cytokine in separate aliquots containing the selected binding buffer and using streptavidin-PE as a secondary detection reagent. Antigen-positive cells were collected, amplified 10-fold and used for two additional rounds of FACS (FACS2 and FACS3) using hu-IL-36 proteins labeled with PEG-Dylight-650 and the same buffer conditions as in FACS1. The percent antigen-positive cells harvested in FACS3 were 2.3% for hu-IL-36α, 1.0% for hu-IL-36β, and 11.4% for hu-IL-36γ. 0.2% of the antigen-positive cells with the highest mean fluorescence intensity were plated and individual clones were picked into deep-well plates and cultured for 48 hours with induction media to induce secretion of Fab fragments into the culture supernatant. Yeast cultures were harvested, cells removed by centrifugation and Fab-containing supernatants were then tested for binding activity to their respective antigens by ELISA.

[0286] For ELISAs with yeast culture supernatants, 96-well ELISA plates were coated with 250 ng/well neutravidin, blocked with PBS containing 0.5% BSA (“blocking buffer”) and then 250 ng of biotinylated hu-IL-36α, hu-IL-36β or hu-IL-36γ was added per well. After washing, 20 μL culture media and 30 μL blocking buffer was added, the plates incubated with rocking for 1 hour at room temperature, washed and bound Fab detected with anti-human-Fab HRP. The majority of clones from these single cytokine sorts exhibited binding activity to the hu-IL-36 cytokine they were selected against in this primary ELISA. In secondary ELISAs testing binding activity for all three hu-IL-36 cytokines, clones that bound to both hu-IL-36α and hu-IL-36γ (but not hu-IL-36β) were observed. Therefore, two FACS sorting strategies were pursued to identify hu-IL-36α/γ-crossreactive clones.

[0287] Identification and Selection of Hu-IL-36α/Hu-IL-36γ-Crossreactive Antibodies

[0288] In the first sorting strategy used to select clones that could recognize both hu-IL-36α and hu-IL-36γ, cells obtained in FACS3 with 150 nM PEG-Dylight-650-huIL-36α (2.3% antigen-positive) were amplified 10-fold and sorted with 100 nM PEG4-biotin-IL-36α, yielding 15.5% antigen-positive cells (FACS4). These cells were amplified and stained with 100 nM PEG-Dylight-650-huIL-36γ, yielding 29.1% antigen-positive cells (FACS5AG). Cells collected in FACS5AG were amplified 10-fold and stained with 10 nM PEG-Dylight-650-huIL-36γ and 10 nM PEG4-biotin-IL-36α (detected with streptavidin-PE), yielding 7.3% IL-36α/γ-double-positive cells (FACS6AG). Cells collected in FACS6AG were amplified 10-fold and stained with 10 nM PEG-Dylight-650-huIL-36α and 10 nM PEG4-biotin-IL-36γ (detected with streptavidin-PE), yielding 1.0% IL-36α/γ-double-positive cells (FACS7AG).

[0289] In the second sorting strategy used to select clones that could recognize both hu-IL-36α and hu-IL-36γ, cells obtained in FACS3 with 150 nM PEG-Dylight-650-huIL-36γ (11.4% antigen-positive) were amplified 10-fold and sorted with 100 nM PEG4-biotin-IL-36α, selecting antigen-positive cells (FACS4GA). These cells were amplified and stained with 100 nM PEG-Dylight-650-huIL-36α and 100 nM PEG4-biotin-IL-36γ (detected with streptavidin-PE), yielding 1.0% IL-36α/γ-double-positive cells (FACS5GA). Cells collected in FACS5GA were amplified 10-fold and stained with 100 nM PEG4-biotin-huIL-36α (detected with streptavidin-PE) and 100 nM PEG-Dylight-650-huIL-36γ, yielding 8.0% IL-36α/γ-double-positive cells (RFACS6GA). Cells collected in RFACS6GA were amplified 10-fold and stained with 100 nM PEG-Dylight-650-huIL-36a and 100 nM PEG4-biotin-IL-36γ (detected with streptavidin-PE), yielding 1.3% IL-36α/γ-double-positive cells (RFACS7GA).

[0290] 0.2% of the IL-36α/γ-double-positive cells from FACS7AG and RFACS7GA with the highest mean fluorescence intensity were plated, individual clones were picked and cultured, and Fab-containing supernatants were then tested for binding activity to hu-IL-36α and hu-IL-36γ by ELISA as described above. 87 clones that bound both hu-IL-36α and hu-IL-36γ were selected for sequencing.

[0291] To obtain the antibody sequence for the selected yeast clones, plasmid DNA was extracted from the yeast clones and used for PCR using a forward primer that binds to the yeast promoter region and reverse primers that bind to the constant region of the human IgG1-CH1 region for the heavy chain and the constant region of the kappa or lambda chain for the light chain. The PCR products were then sequenced by Sanger sequencing using the same primers used for the PCR reaction.

[0292] The 87 hu-IL-36α/γ cross-reactive clones represented 30 unique clones by sequence.

[0293] Identification and Selection of Hu-IL-36β-Reactive Antibodies

[0294] In the sorting strategy used to select clones that could recognize hu-IL-36β, cells obtained in FACS3 with 150 nM PEG-Dylight-650-huIL-36β (1.0% antigen-positive) were amplified 10-fold and sorted with 100 nM PEG4-biotin-IL-36β and detected with streptavidin-PE, yielding 13.1% antigen-positive cells (FACS4B). These cells were amplified and stained with 20 nM PEG-Dylight-650-huIL-36β, yielding 5.8% IL-36β-positive cells (FACS5B).

[0295] 0.2% of the IL-36β-positive cells from FACS5B with the highest mean fluorescence intensity were plated, individual clones were picked and cultured, and Fab-containing supernatants were then tested for binding activity to their respective antigens by ELISA as described above. The majority of the clones from this sort exhibited binding activity to IL-36β.

[0296] A total of 83 IL36BS7 clones were sequenced as described above, yielding 8 unique clones.

[0297] B. In Vitro Screening of Yeast Cell Supernatants Containing Anti-Hu-IL-36 Antibodies

[0298] Cell supernatants from yeast clones of interest were tested for binding to human IL-36 by ELISA as described above. To compare the binding of these supernatants to human and cynomolgus monkey IL-36, IL-36 proteins were coated at 2.5 μg/mL on 96-well Nunc MaxiSorp plates (Thermo Fisher) and the plates blocked with 5% goat serum in PBS. Yeast supernatants were diluted 1:1 with PBST containing 1% w/v BSA and added to the ELISA plates for 1-1.5 hours with agitation. Bound Fab was detected by incubating the plates with F(ab′)2-HRP (Jackson ImmunoResearch). The ELISAs were developed for 3-10 minutes by addition of 50 μL/well of tetramethylbenzidine (TMB) microwell peroxidase substrate (Scytek Laboratories, Inc., Logan, Utah, USA) and enzymatic color development was stopped by acidification with 50 μL/well of 2 N H2504 (Sigma-Aldrich Corporation, St. Louis, Mo., USA). The optical density of the samples at a wavelength of 450 nm (OD450) was analyzed with a SpectraMax i3X plate reader (Molecular Devices LLC, San Jose, Calif., USA). To estimate the relative affinity of each clone for cynomolgus monkey IL-36 and human IL-36 in this assay, a ratio of OD450 (OD450_{cyIL-36}/OD450_{huIL-36}) was calculated for each clone and IL-36 cytokine. Eight anti-IL-36 Fab clones (mAb1.0-mAb8.0) were selected for further characterization and results are shown in Table 3.

TABLE 3
Binding of selected anti-IL-36 Fabs to hu-IL-36 and cy-IL-36
by ELISA.

| | ELISA OD₄₅₀ | | | ELISA OD₄₅₀cyIL-36/ | | |
|---|---|---|---|---|---|---|
| | hu-IL- | hu-IL- | hu-IL- | OD₄₅₀hu-IL-36 | | |
| Antibody | 36α | 36β | 36γ | IL-36α | IL-36β | IL-36γ |
| mAb1.0 | 0.9398 | 0.0523 | 2.4295 | 0.6 | N.T. | 1.3 |
| mAb2.0 | 2.5315 | 0.0604 | 2.5023 | 0.7 | N.T. | 1.2 |
| mAb3.0 | 1.6265 | 0.1097 | 2.1116 | 0.5 | N.T. | 1.0 |
| mAb4.0 | 2.1644 | 0.0513 | 2.2984 | 0.5 | N.T. | 1.2 |
| mAb5.0 | 2.0511 | 0.1285 | 2.077 | 0.5 | N.T. | 1.0 |
| mAb6.0 | 0.0638 | 2.3414 | 0.0656 | N.T. | 4.0 | N.T. |
| mAb7.0 | 0.0604 | 2.5818 | 0.0724 | N.T. | 3.9 | N.T. |
| mAb8.0 | 0.0698 | 2.6319 | 0.073 | N.T. | 0.1 | N.T. |

N.T. = not tested

[0299] C. Cell-Based Assay to Determine Blocking Potency of Fab Supernatants

[0300] HEK-Blue cell lines, described in this and the following examples, use the HEK-293 cell line (human embryonic kidney epithelial cells) as the original parental lineage. The HEK-Blue IL-1/IL-33 sensor cells, were obtained from InvivoGen (InvivoGen, San Diego, Calif., USA; catalog # hkb-il33). These IL-1/IL-33 sensor cells were generated by stable transfection of HEK-Blue IL-1β sensor cells (InvivoGen; catalog # hkb-il1b) with the human ST2 gene expressing the IL-33 receptor ST2. HEK-Blue IL-1β cells express an NF-κB/AP-1 SEAP (secreted embryonic alkaline phosphatase) reporter gene and contain an inactivated TNF-α response to ensure SEAP production is representative of IL-1 or IL-33 pathway activation. The HEK-Blue IL-1/IL-33 responsive cells were maintained according to manufacturer guidelines. Briefly, the cells were maintained in a standard growth medium consisting of DMEM (Corning, Inc., Corning, N.Y., USA), supplemented with 10% fetal bovine serum (FBS) (Atlanta Biologicals, Inc., Flowery Branch, Ga., USA), 100 IU/mL penicillin and 100 μg/mL streptomycin. The growth medium was further supplemented with 100 μg/mL zeocin to maintain the plasmid coding for SEAP, 200 μg/mL hygromycin B to maintain IL-1 specificity and 100 μg/mL blasticidin to maintain the plasmid encoding ST2. The plasmid containing the human ID RL2 gene, encoding the IL-36 receptor, was generated by AvantGen (custom order). HEK-Blue IL-1/IL-33 sensor cells were transiently transfected using LyoVec (InvivoGen) according to manufacturer guidelines. Briefly, LyoVec-DNA complexes were added directly to cells suspended in standard growth medium, at a concentration that would produce a minimum of 80% confluency 24 hours post-transfection, and immediately plated on 96-well, flat-bottom plates. 24 hours post-transfection, the cells were used within a standard HEK-Blue SEAP assay.

[0301] An agonist dose-response curve, consisting of a serial dilution series, was generated to provide an estimate of the half maximal effective concentration (EC₅₀) of agonist to be used in the assay. The following commercially available human cytokines were used as agonists in some HEK-Blue assays: IL-36α (BioLegend), IL-36β (Novus Biologicals) and IL-36γ (Novus Biologicals). 24 hours prior to experimental use, the transiently transfected cells were plated on 96-well, flat-bottom plates at a concentration resulting in a minimum of 80% confluency at the time of use. The desired agonist was added to the cells to a final volume 200 μL and the cells incubated for 24 hours at 37° C. with 5% 002. SEAP production was quantified using a SEAP detection assay. The SEAP detection medium QUANTI-Blue (InvivoGen) was used to determine the level of SEAP within the various conditions indicated and per general manufacturer guidelines. Specifically, 20 μL of cell culture supernatant (collected 24 hours post-agonist addition) was added to 130 μL of QUANTI-Blue detection medium. The reaction was allowed to proceed for one hour at 37° C., at which point a SpectraMax (Molecular Devices) spectrophotometer was used to measure the absorbance at a wavelength of 650 nm in conjunction with SoftMax Pro software (Molecular Devices). The raw assay data was analyzed using GraphPad Prism 7 software to perform a non-linear regression determination of the agonist EC₅₀ value in the assay.

[0302] HEK-Blue SEAP assays of non-purified anti-hu-IL-36 Fab fragments in yeast cell culture supernatant (SN) were performed as described above but with the following modifications. Non-purified, yeast cell culture SN containing the anti-hu-IL-36 Fab fragments was concentrated 20-fold and buffer-exchanged into PBS (1:20) to reduce background noise in the HEK-Blue SEAP assay. 40 μL of PBS and 10 μL of concentrated and buffer-exchanged yeast cell culture SN containing the anti-hu-IL-36 Fab fragments was added to HEK-Blue IL-1/IL-33 cells transfected with IL-36R. The cells and antibody-containing hybridoma cell culture SN were incubated for one-hour at 37° C. with 5% 002. Following the one-hour antibody incubation, the agonist was added to the wells containing the cells and antibodies at 4× the desired concentration, and in a manner resulting in 1× the final desired concentration within a total volume of 200 μL. The percent inhibition was calculated by determining the ratio of the absorbance value obtained from the sample (in this case anti-hu-IL-36 antibody-containing yeast cell culture SN) in relation to the positive control (cells exposed to the agonist only in the presence of yeast cell culture SN containing an irrelevant Fab) and multiplying this ratio by 100.

[0303] The results for the 8 anti-IL-36 Fab clones (mAb1.0-mAb8.0) selected for further characterization are shown in Table 4 below. The sequences for the selected clones are also disclosed in Table 2 and the accompanying Sequence Listing.

TABLE 4
Blocking activity of selected anti-lL-36 yeast clone
Fab supernatants in HEK Blue cell-based assay

| Yeast Fab | % Inhibition | | |
|---|---|---|---|
| supernatant | hu-IL-36a | hu-IL-36b | hu-IL-36g |
| mAb1.0 | 70 | N.D. | 31 |
| mAb2.0 | 91 | N.D. | 89 |
| mAb3.0 | 40 | N.D. | 64 |
| mAb4.0 | 91 | N.D. | 57 |
| mAb5.0 | 75 | N.D. | 75 |
| mAb6.0 | N.D. | 86 | N.D. |
| mAb7.0 | N.D. | 84 | N.D. |
| mAb8.0 | N.D. | 85 | N.D. |

[0304] Based on their observed binding and blocking activities summarized in Tables 3 and 4, five of the IL-36α/IL-36γ-crossreactive antibodies (mAb1.0-mAb5.0) and three of the IL-36β-reactive antibodies (mAb6.0-mAb8.0) were produced as recombinant human IgG1 and cleaved Fab fragments for further characterization. IgGs were produced by transient co-transfection of mammalian expression plasmids encoding their heavy and light chains in Expi293 or ExpiCHO cells (Thermo Fisher Scientific) according to the manufacturer's instructions. Cells were harvested after 5-7 days and the clarified supernatant was applied to MabSelect SuRe columns (GE Healthcare, Chicago, Ill., USA) equilibrated in TBS. Protein was eluted in 20 mM citrate pH 2.95, 150 mM NaCl (CBS) and immediately neutralized with 1/25 volume 1.5 M Tris-HCl pH 8.8. Fab fragments and were produced by lysyl-C (Wako Chemicals) cleavage. Briefly, Lysyl-C cleavage was carried out in PBS containing 100 mM Tris pH 8.0 at 37° C. for 1 hour with gentle agitation, and stopped by diluting the reaction 10-fold into 50 mM sodium acetate pH 5.2. The Fab fraction was purified by applying the sample to an SP-HP cation exchange column (GE Healthcare, Chicago, Ill., USA) equilibrated in 10 mM sodium acetate pH 5.2 and eluting with a 30 column volume gradient to 100% 10 mM sodium acetate pH 5.2, 1 M NaCl. Fractions containing Fab were pooled, concentrated and buffer-exchanged into PBS.

[0305] D. Binding Kinetics Analysis of Selected Anti-IL-36 Antibodies

[0306] Surface plasmon resonance (SPR) analysis was used to determine binding affinity for hu-IL-36α and hu-IL-36γ of the purified mAb2.0 Fab; and for hu-IL-36β of the purified mAb6.0 Fab using a BIACORE™ 8K instrument (GE Healthcare, Chicago, Ill., USA). Briefly, a 1:4 dilution of Biotin CAPture Reagent (GE Healthcare, Chicago, Ill., USA)) into HBS-EP buffer (GE Healthcare, Chicago, Ill., USA; 0.01 M HEPES pH 7.4, 0.15 M NaCl, 3 mM EDTA, 0.005% Surfactant P20) was applied to a CAP sensor chip at 2 μL/min flow rate. For kinetics measurements, 12.5 nM biotinylated hu-IL-36α and hu-IL-36γ; 6 nM biotinylated hu-IL-36β was captured at 10 μL/min to achieve 25-40 response units in the second flow cell (FC2). FC1 was kept as a reference. Next, 2-fold serial dilutions of the Fab protein in HBS-P buffer (GE Healthcare, Chicago, Ill., USA; 0.01 M HEPES pH 7.4, 0.15 M NaCl, 0.005% surfactant P20) from low (0.78 nM of mAb2.0 Fab, 1.56 nM of mAb6.0 Fab) to high (100 nM of mAb2.0 Fab, 200 nM of mAb6.0 Fab) were injected (flow rate: 30 μL/min) at either 25° C. or 37° C. The sensorgram was recorded and subject to reference and buffer subtraction before data analysis with the BIACORE® 8K Evaluation Software (GE Healthcare, Chicago, Ill., USA; version 1.1.1.7442). Association rates (kₒₙ) and dissociation rates (k_{off}) were calculated using a simple one-to-one Langmuir binding model. The equilibrium dissociation constant (K_{D}) was calculated as the ratio of k_{off}/kₒₙ.

[0307] The Biacore affinity results for mAb2.0 Fab and mAb6.0 Fab are summarized below in Table 5.

TABLE 5
Binding affinity of selected anti-IL-36 antibodies at 25° C. and 37° C. (K_{D}, kₒₙ, k_{off})

| 1:1 binding fit | | | | | | | |
|---|---|---|---|---|---|---|---|
| | Biotinylated | K_{D} (nM) | | kₒₙ (1/Ms) | | k_{off} (1/s) | |
| Fab | hu-IL-36 | 25° C. | 37° C. | 25° C. | 37° C. | 25° C. | 37° C. |
| mAb2.0 | hu-IL-36α | 1.2 | 0.3 | 3.45*10⁵ | 1.69*10⁶ | 4.13*10⁻⁴ | 5.02*10⁻⁴ |
| mAb6.0 | hu-IL-36β | 1.79 | 1.93 | 4.04*10⁴ | 6.11*10⁴ | 7.23*10⁻⁵ | 1.18*10⁻⁴ |
| mAb2.0 | hu-IL-36γ | 0.98 | 1.61 | 3.66*10⁵ | 6.71*10⁵ | 3.58*10⁻⁴ | 1.08*10⁻³ |

[0308] E. Functional Activity of Recombinant Anti-IL-36 Antibodies in Cell-Based Assays

[0309] Hu-IL-36-Blocking Activity of Antibodies in HEK Blue Reporter Assay

[0310] The recombinant anti-hu-IL-36 antibodies derived from the eight parental yeast clones, mAb1.0-mAb8.0, were tested to determine their abilities to block hu-IL-36α, hu-IL-36β and hu-IL-36γ mediated activation of the ID RL2/IL1RAP pathways using the HEK-Blue IL-1/IL-33 sensor cells transiently transfected with the IL-36 receptor, ID RL2.

[0311] HEK-Blue SEAP assays using recombinant anti-hu-IL-36 antibodies were performed similarly to the assay described above with yeast cell culture SN. Briefly, the antibody was incubated with cells, in the absence of agonist within the standard growth medium, for one hour at 37° C. with 5% CO₂. Following the one-hour incubation, the desired agonist, at the estimated EC₅₀ concentration, was added to a final volume 200 μL and the experiment was allowed to proceed for an additional 24 hours. The negative control (NC), represents cells exposed to growth medium only, while the positive control (PC) represents cells exposed to the agonist only (in the absence of antagonistic or control antibodies).

[0312] To determine the half maximal inhibitory concentration (IC₅₀) of the antibodies (including Fabs as described in the following Examples), a seven-point serial dilution series was used (starting at the concentration indicated). As with the agonist dose response curves described herein, non-linear regression analysis was performed using GraphPad Prism 7 software to determine the IC₅₀ value from the assay results.

[0313] Hu-IL-36α (SEQ ID NO: 1), hu-IL-36β (SEQ ID NO: 2), and hu-IL-36γ (SEQ ID NO: 3), were used as agonists in the following HEK-Blue assays. Dose responses were carried out for all of the mAbs. Results of these HEK Blue assays are shown below in Table 6.

TABLE 6
IL-36 inhibition in HEK Blue assay of
recombinant anti-hu-IL-36 antibodies

| | IC₅₀ (nM) | | |
|---|---|---|---|
| Antibody | hu-IL-36α | hu-IL-36β | hu-IL-36γ |
| mAb1.0 | 43 | N.D. | 5.3 |
| mAb2.0 | 5.7 | N.D. | 7.5 |
| mAb3.0 | 90 | N.D. | 30 |
| mAb4.0 | 16 | N.D. | 52 |
| mAb5.0 | 95 | N.D. | 142 |
| mAb6.0 | N.D. | 0.64 | N.D. |
| mAb7.0 | N.D. | 1.4 | N.D. |
| mAb8.0 | N.D. | 0.34 | N.D. |

N.D. = no blocking activity detected

[0314] As shown by the HEK Blue assay results of Table 6, of all antibodies tested mAb2.0 demonstrated the most potent blocking activity for both hu-IL-36α and hu-IL-36γ, whereas mAb6.0 demonstrated potent blocking activity for hu-IL-368.

[0315] Cy-IL-36-Blocking Activity of Antibodies in HEK Blue Reporter Assay

[0316] The recombinant anti-hu-IL-36 antibodies mAb2.0 and mAb6.0 were tested to determine their abilities to block cynomolgus monkey IL-36 (cy-IL-36α, cy-IL-36β and cy-IL-36γ)-mediated activation of the ID RL2/IL1RAP pathways using the HEK-Blue IL-1/IL-33 sensor cells transiently transfected with the human IL-36 receptor ID RL2. HEK-Blue SEAP assays performed using cynomolgus monkey IL-36 were performed similarly to the assay described above with human IL-36 cytokines. Cy-IL-36α, cy-IL-36β, and cy-IL-36γ, were used as agonists in this HEK-Blue assay. Agonist dose-response curves, consisting of a twelve-point serial dilution series, were generated to demonstrate potent signaling of the cy-IL-36 cytokines through the human ID RL2/IL1RAP pathways, and to provide an estimate of the half maximal effective concentration (EC₅₀) of agonist to be used in the assay. To determine the half maximal inhibitory concentration (IC₅₀) of the antibodies an eleven-point serial dilution series was used. As with the agonist dose response curves mentioned previously, non-linear regression analysis was performed using Graph Pad Prism 7 software to determine the IC₅₀ value from the assay results. Dose responses were carried out for all of the mAbs. mAb2.0 demonstrated potent blocking activity for cy-IL-36α and cy-IL-36γ (IC₅₀ 0.56 nM and 1.71 nM, respectively), whereas mAb6.0 demonstrated potent blocking activity for cy-IL-36β (IC₅₀ 1.96 nM).

[0317] Blocking Activity of Anti-Hu-IL-36 Antibodies in IL-36-Stimulated IL-8 Secretion by HaCat Cells

[0318] The human keratinocyte cell line HaCat is derived from in vitro spontaneously transformed keratinocytes from histologically normal skin. The HaCat cell line is commercially available and was obtained from AddexBio (catalog # T002000). The cryopreserved cells were thawed and maintained using the general guidelines recommended by the manufacturer. HaCat cells were maintained in a growth medium consisting of DMEM with L-Glutamine, 4.5 g/L Glucose and Sodium Pyruvate (Corning), supplemented with 10% fetal bovine serum (Atlanta Biologicals) that was heat-inactivated prior to use (56° C. for 30 minutes), 100 IU/mL penicillin and 100 μg/mL streptomycin, 1 mM sodium pyruvate (Corning). The day prior to experimental use, HaCat cells were seeded on flat-bottom, 96-well plates at 10,000 cells/well to be at ˜80-85% confluency the day of use.

[0319] Prior to use in antibody blocking assays, the agonist EC₅₀ was determined by performing an agonist dose-response curve in a similar manner as described in Example 2 for the HEK Blue cells but with the following modifications. Following addition of the agonist to HaCat cells in wells containing HaCat cell growth medium only (final volume 200 μL), the cells were returned to the tissue culture incubator (37° C. with 5% CO₂) for 24 hours. Tissue culture supernatant was then collected and stored at −20° C.

[0320] The antibody blocking assays were performed as above for HEK Blue cells but in a manner conducive to obtaining IC₅₀ values, with modifications to specifically account for HaCat cell usage. Briefly, the anti-hu-IL-36 IgG antibody, the natural IL-36 antagonist IL-36Ra, or an appropriate antibody control (e.g., Hu IgG1 Ctrl), was incubated with HaCat cells for 1 hour at 37° C., followed by the addition of agonist (IL-36α, IL-36β, or IL-36γ). The experiment was allowed to proceed for an additional 24 hours (37° C. with 5% CO₂), with cell culture supernatants collected and quantification of IL-8 performed as described below.

[0321] A human IL-8 ELISA kit (Thermo Fisher Scientific) was used to quantify the level of IL-8 within the supernatant according to the manufacturer guidelines. The raw data obtained was analyzed using GraphPad Prism software, with interpolations performed using linear regression analysis. Interpolated data was then analyzed using non-linear regression 3 parameter analysis to derive agonist EC₅₀ and antibody IC₅₀ values.

[0322] As shown by the results in FIG. 1A and FIG. 1C, mAb2.0 demonstrated potent blocking activity for hu-IL-36α and hu-IL-36γ (IC₅₀ 0.28 nM and 1.23 nM, respectively), whereas as shown in FIG. 1B, mAb6.0 demonstrated potent blocking activity for hu-IL-36β (IC₅₀ 0.082 nM) in the HaCat human keratinocyte cell line. The blocking potency of mAb2.0 for hu-IL-36α and hu-IL-36γ was superior to that of the natural antagonist IL-36Ra (100-fold and 12-fold, respectively), and the blocking potency of mAb6.0 for hu-IL-36β was superior to that of IL-36Ra (1000-fold).

[0323] Activity of Anti-IL-36 Antibodies in Blocking IL-36-Stimulated IL-8 Secretion by Primary Human Keratinocytes

[0324] Primary human neonatal pooled keratinocytes (HEKn) are commercially available and were obtained from ThermoFisher (catalog # A13401). Cells were isolated from normal (disease free) donated human tissue and cryopreserved by the manufacturer. The cells were thawed and maintained using the general guidelines recommended by the manufacturer. HEKn cells were maintained in a growth medium consisting of EpiLife Medium (ThermoFisher) with Human Keratinocyte Growth Supplement (ThermoFisher), 100 IU/mL penicillin and 100 μg/mL streptomycin. The day prior to experimental use, HEKn cells were seeded on flat-bottom, 96-well plates at 10,000 cells/well to be at ˜80-85% confluency the day of use.

[0325] Prior to use in antibody blocking assays, the agonist EC₅₀ was determined by performing an agonist dose-response curve in a similar manner as described in Example 2 for the HaCat cells but with the following modifications. Following addition of the agonist to HEKn cells in wells containing cell growth medium only (final volume 200 μL), the cells were returned to the tissue culture incubator (37° C. with 5% CO₂) for 24 hours. Tissue culture supernatant was then collected and stored at −20° C.

[0326] The antibody blocking assays were performed as above for HaCat cells. Briefly, xIL-36 IgG, or an appropriate antibody control (e.g., Hu IgG1 Ctrl), was incubated with HEKn cells, as indicated, for 1 hour at 37° C., followed by the addition of agonist (IL-36α, IL-36β, or IL-36γ). The experiment was allowed to proceed for an additional 24 hours (37° C. with 5% CO₂), with cell culture supernatants collected and quantification of IL-8 performed as described below.

[0327] A human IL-8 ELISA kit (Thermo Fisher Scientific) was used to quantify the level of IL-8 within the supernatant according to the manufacturer guidelines. The raw data obtained was analyzed using GraphPad Prism software, with interpolations performed using linear regression analysis. Interpolated data was then analyzed using standard non-linear regression 3 parameter analysis to derive agonist EC₅₀ and antibody IC₅₀ values.

[0328] As shown by the HEKn assay results in FIG. 2A and FIG. 2C, mAb2.0 demonstrated potent blocking activity for hu-IL-36α and hu-IL-36γ (IC₅₀ 0.33 nM and 2.27 nM, respectively), whereas as shown in FIG. 2B, mAb6.0 demonstrated potent blocking activity for hu-IL-36β (IC₅₀ 1.75 nM) in primary human adult keratinocytes.

### Example 3: Activity of mAb6.0 HC/mAb2.0 LC Chimera mAb6.0_2.0 in Binding and Blocking Hu-IL-36β

[0329] mAb6.0_2.0 was generated similar to other IgGs described in Example 2 above, except by co-transfecting the heavy chain of mAb6.0 and the light chain of mAb2.0.

[0330] Surface plasmon resonance (SPR) analysis was used to determine binding affinity for hu-IL-36β of mAb6.0_2.0 IgG using a BIACORE™ 8K instrument (GE Healthcare, Chicago, Ill., USA). Briefly, 6 nM mAb6.0_2.0 IgG or mAb6.0 IgG in HBS-P buffer (GE Healthcare, Chicago, Ill., USA; 0.01 M HEPES pH 7.4, 0.15 M NaCl, 0.005% surfactant P20) was captured on a protein A sensor chip (GE Healthcare, Chicago, Ill., USA) a 10 μL/min to achieve 50-60 response units in the second flow cell (FC2). FC1 was kept as a reference. Next, 3-fold serial dilutions of hu-IL-36β in HBS-P buffer from low (0.046 nM of hu-IL-36β) to high (100 nM of hu-IL-36β) were injected (flow rate: 30 μL/min) at either 37° C. The sensorgram was recorded and subject to reference and buffer subtraction before data analysis with the BIACORE® 8K Evaluation Software (GE Healthcare, Chicago, Ill., USA; version 1.1.1.7442). Association rates (kₒₙ) and dissociation rates (k_{off}) were calculated using a simple one-to-one Langmuir binding model. The equilibrium dissociation constant (K_{D}) was calculated as the ratio of k_{off}/kₒₙ.

[0331] mAb6.0_2.0 IgG bound hu-IL-36β with a K_{D} of 6.7 nM (kₒₙ=3.20×10⁵ 1/Ms, k_{off}=2.14×10⁻³ 1/s) while mAb6.0 IgG bound hu-IL-36β with a K_{D} of 0.42 nM (kₒₙ=3.62×10⁵ 1/Ms, k_{off}=1.15×10⁻⁴ 1/s). Thus mAb6.0_2.0 bound hu-IL-36β with a 16-fold lower affinity than mAb6.0.

[0332] To determine the blocking potency and efficacy of mAb6.0_2.0 IgG in vitro, we evaluated its ability to inhibit hu-IL-36β-stimulated IL-8 secretion by HaCat cells. HaCat cell assays were performed as described in Example 2. Briefly, mAb6.0_2.0 IgG, mAb6.0 IgG, or an appropriate antibody control (e.g., Hu IgG1 Ctrl), was incubated with HaCat cells for 1 hour at 37° C., followed by the addition of hu-IL-36β agonist. The experiment was allowed to proceed for an additional 24 hours (37° C. with 5% 002), with cell culture supernatants collected and quantification of IL-8 performed as described in Example 2. Interpolated data was then analyzed using standard non-linear regression analysis in GraphPad Prism software to derive antibody IC₅₀ values.

[0333] mAb6.0_2.0 IgG was found to inhibit hu-IL-36β-stimulated IL-8 secretion by HaCat keratinocyte cell line with a 16-fold lower potency than mAb6.0 IgG (mAb6.0_2.0 IC₅₀=12.7 nM; mAb6.0 IC₅₀=0.8 nM).

### Example 4: Affinity Maturation of Anti-IL-36 Antibodies Using Phage Library Panning

[0334] This example illustrates the preparation of affinity matured versions of the mAb6.0_2.0 and mAb2.0 antibodies with improved affinities for IL-36β and IL-36α/γ.

[0335] A Mutation to Prevent Pyroglutamate Conversion

[0336] To prevent the formation of pyroglutamate variants, glutamine (Q or Gln) may be mutated to glutamate (E or Glu) (Amphlett, G. et al., Pharm. Biotechnol., 9:1-140 (1996)). Position 1 (according to Kabat numbering) in the heavy chain variable domains and light chain variable domains of mAb2.0 and mAb6.0 was mutated from glutamine (Q) to glutamate (E) by gene synthesis, resulting in antibodies mAb2, mAb6 and mAb6_2. The variable domains were cloned into a mammalian Fab expression construct containing an 8×His tag to generate Fab proteins. Similar mutations at position 1 may also be made in mAb1.0, mAb3.0, mAb4.0, mAb5.0, mAb7.0 and mAb8.0.

[0337] B. mAb6_2 Affinity Maturation NNK Library Construction and Panning

[0338] To improve the affinity of mAb6 heavy chain paired with mAb2 light chain (mAb6_2, one arm for common light chain bispecific molecule) against human IL-36β, phage libraries were constructed from mAb6_2 in Fab-amber format for monovalent Fab phage display with heavy chain HVR residues (i.e., HVR-H1, HVR-H2, and HVR-H3) randomized using the NNK degenerate codon that encodes for all 20 amino acids with 32 codons (Brenner et al., 1992) (with mAb2 light chain residues kept unchanged). Libraries were designed to allow one NNK mutation in each of the three heavy chain HVRs. Synthesized mutagenesis oligonucleotides were then used to construct heavy chain libraries using Kunkel mutagenesis (Kunkel et al., 1987). The resultant library DNA was electroporated into E. coli XL1 cells, yielding approximately 4×10⁹ transformants. Phage libraries were incubated in SUPERBLOCK™ PBS buffer (Pierce) and 0.05% TWEEN® 20 for 30 min and then applied on human IL-36β coated plate for first round panning. In the subsequent two to three rounds, phage libraries were incubated with decreasing concentration of biotinylated human IL-36β with 1000× non-biotinylated human IL-36β as competitor in solution to increase the selection stringency.

[0339] C. Characterization of mAb6_2 Phage Variants from Affinity Maturation NNK Library

[0340] Selected phages with top binding signal were purified to perform phage competition ELISA. The optimal phage concentration was incubated with serially-diluted human IL-36β in ELISA buffer (0.5% BSA and 0.05% TWEEN® 20 in PBS) in NUNC F plate for two hours. 80 μl of the mixture was transferred to human IL-36β coated wells for 15 min to capture unbound phage. The plate was washed with wash buffer (0.05% TWEEN® 20 in PBS), and HRP-conjugated anti-M13 antibody (Sino biological, Cat #11973-MM05-H-50) was added in ELISA buffer for 30 min. The plate was incubated at room temperature for one hour with agitation, washed six times with wash buffer and developed for 15 minutes by addition of 100 μL/well of 1 Step Turbo TMB substrate (ThermoFisher, Cat #34022). The enzymatic reaction was stopped using 50 μL/well of 2N H2504. Plates were analyzed using a Perkin Elmer plate reader (Envision 2103 multilabel reader) at 450 nm. The absorbance at 450 nm was plotted as a function of antigen concentration in solution to determine phage IC₅₀. This was used as an affinity estimate for the Fab clone displayed on the surface of the phage. Real affinities for purified Fab molecules for the phage variants were also measured using Biacore (method described in detail in section E below). Variant HVR sequences, phage IC₅₀ summary and K_{D} values are shown below in Table 7.

TABLE 7
mAb6_2 variant HVR sequences, IC₅₀ and K_{D}
values against hu-IL-36β

| | | | | | Bia- |
|---|---|---|---|---|---|
| | HVR-H1 | | | | core |
| Vari- | (30- | HVR-H2 | HVR-H3 | IC₅₀ | K_{D} |
| ant | 35A) | (50-61) | (93-102) | (nM) | (nM) |
| mAb6_ | TSSNYYW | SIDYTGSTYYNP | ARGKYYETYLGFDV | 8.57 | 40.1 |
| 2 | | | | | |
| mAb6_ | TSTNYYW | NIDYTGSTYYNA | ATGKYYETYLGFDV | 0.77 | 3.50 |
| 2.1 | | | | | |
| mAb6_ | TSSNAYW | SIDYTGSTAYNP | AHGKYYETYLGFDV | 1.04 | 2.55 |
| 2.2 | | | | | |
| mAb6_ | TASNYYW | SIDYTGSTYYNT | ATGKYYETYLGFDV | 0.49 | 1.62 |
| 2.3 | | | | | |
| mAb6_ | TASNYYW | SIDYTGSTYYNP | ATGKYYETYLGFDV | ND | 1.05 |
| 2.4 | | | | | |

[0341] D. Next Generation Sequencing of mAb6_2 Affinity Maturation Libraries

[0342] In order to further improve the affinity of mAb6_2, next-generation sequencing (NGS) of mAb6_2 affinity maturation libraries was performed. Phagemid double-stranded DNA was isolated from E. coli XL-1 cells carrying phagemids from the initial phage library (unsorted libraries) and from the second and third rounds of solution selection (sorted libraries). Purified DNA was used as the template to generate amplicons of V_{H} regions using the Illumina 16s library preparation protocol. Sequencing adapters and dual-index barcodes were added using the Illumina Nextera XT Index Kit. In preparation for sequencing on an Illumina MiSeq instrument (Illumina, San Diego, USA), adapter-ligated amplicons were subjected to standard Illumina library denaturing and sample loading protocol using MiSeq Reagent Kit v3 (600 cycles). Paired-end sequencing was performed to cover the entire length of the amplicon with insert size of 200 bp to 300 bp.

[0343] Paired-end sequencing data were first assembled using paired-end assembler PANDAseq (Masella et al., 2012) to obtain complete amplicons. Quality control (QC) was then performed on identified amplicons, where each amplicon was checked for the absence of sequence insertions or deletions and stop codons, and each CDR sequence was allowed to carry only up to one NNK mutation and no non-NNK mutations. Position weight matrices were generated by calculating the frequency of all mutations of every randomized position. Enrichment ratios for each mutation were calculated by dividing the frequency of a given mutation at a given position in the sorted sample with the frequency of the very same mutation in the unsorted sample, as described previously (Koenig et al., 2015). Predicted mutations in their HVRs that supported improved binding of mAb6_2 to hu-IL-36β are summarized in Table 8 below.

TABLE 8
Predicted mutations in mAb6_2 supporting hu-IL-36β binding

| Domain | Position | Substitutions with Improved Binding |
|---|---|---|
| HVR-H1¹ | T30 | D, E, N |
| | S31 | A, E, G, K, Q, R, T |
| | S32 | A, D, E, G, N, P, Q, T |
| | Y34 | A, E, G, H, M, N, Q, S, T, V |
| | W35A | F, I, V, Y |
| HVR-H2² | S50 | N, T |
| | I51 | M, V |
| | Y53 | H |
| | T54 | H, L, N |
| | G55 | A, D, E, H, K, N, Q, R, S, T |
| | S56 | A, D, Q, T |
| | T57 | A, D, E |
| | Y58 | A, F, Q, S, W |
| | N60 | D, E, H, P, Q |
| | P61 | A, E |
| HVR-H3³ | R94 | A, E, G, H, M, N, Q, S, T, Y |
| | K96 | A, S |
| | E99 | T |

¹HVR-H1 from positions 30-35A
²HVR-H2 from positions 50-61
³HVR-H3 from positions 93-102

[0344] E. Characterization of mAb6_2 Affinity-Improved NGS Variants

[0345] Generation of mAb6_2 Affinity-Improved NGS Fab Variants

[0346] According to predicted mutations from NGS analysis (shown in Table 8 above), selected mAb6_2 NGS Fabs with variant HVR sequences (shown below in Table 9) were synthesized for cloning into a mammalian Fab expression construct containing an 8×His tag to generate Fab proteins. Plasmids encoding the heavy or light chain were transiently transfected into Expi293F cells (Thermo Fisher) according to the manufacturer's protocol using a 1:1 ratio of HC:LC. Fabs were purified with a HisPur Ni-NTA column by diluting supernatant 1.5× with 1× phosphate-buffered saline pH 7.2 (PBS), adding 10 mM imidazole, and binding to resin in batch mode for 2 hours. Resin was flowed over a column and washed with 20 CV PBS+20 mM imidazole and eluted with 5 CV PBS+250 mM imidazole. Samples were buffer exchanged to PBS using a PD10 column (GE).

[0347] Affinity Determination of mAb6_2 Affinity-Improved NGS Fab Variants Using SPR

[0348] To determine the binding affinity of recombinant mAb6_2 NGS Fab variants to human IL-36β at 37° C., SPR measurements with a BIACORE™ 8K instrument were performed. Briefly, a 1:4 dilution of Biotin CAPture Reagent (GE) into HBS-EP buffer (0.01 M HEPES pH 7.4, 0.15 M NaCl, 3 mM EDTA, 0.005% Surfactant P20) was applied to a CAP sensor chip at 2 uL/min flow rate. For kinetics measurements, 6 nM biotinylated human IL-36β was captured at 10 uL/min to achieve ˜50 response units in the second flow cell (FC2). FC1 was kept as a reference. Next, 3-fold serial dilutions of Fab in HBS-P buffer (0.01M HEPES pH 7.4, 0.15M NaCl, 0.005% surfactant P20) from low (3.125 nM) to high (200 nM) were injected (flow rate: 10 uL/min) at 37° C. The sensorgram was recorded and subject to reference and buffer subtraction before evaluating by BIACORE® 8K Evaluation Software (version 1.1.1.7442). Association rates (kₒₙ) and dissociation rates (k_{off}) were calculated using a simple one-to-one Langmuir binding model. The equilibrium dissociation constant (K_{D}) was calculated as the ratio of k_{off}/kₒₙ summarized in Table 9.

TABLE 9
mAb6_2 variant HVR sequences, their kₒₙ, k_{off}
and K_{D} values against hu-IL-36β

| Fab | HVR-H1 | HVR-H2 | HVR-H3 | | | |
|---|---|---|---|---|---|---|
| Iden- | (30- | (50- | (93- | kₒₙ | k_{off} | K_{D} |
| tifier | 35A) | 61) | 102) | (1/MS) | (1/S) | (nM) |
| mAb6_ | TSSNYYW | SIDYTG | ARGKYYE | 8.72 × | 1.28 × | 14.7 |
| 2 | | STYYNP | TYLGFDV | 10⁴ | 10⁻³ | |
| mAb6_ | TASNYYW | SIDYTG | ATGSYYE | 7.17 × | 4.76 × | 0.66 |
| 2.5 | | STYYEP | TYLGFDV | 10⁵ | 10⁻⁴ | |
| mAb6_ | TASNYYW | SIDYTG | ATGNYYE | 8.50 × | 7.05 × | 0.82 |
| 2.6 | | STYYEP | TYLGFDV | 10⁵ | 10⁻⁴ | |
| mAb6_ | TASNTYW | SIDYTG | ATGKYYE | 2.97 × | 1.80 × | 0.61 |
| 2.7 | | STYYNP | TYLGFDV | 10⁵ | 10⁻⁴ | |
| mAb6_ | TASNYYW | SIDYTG | ASGKYYE | 3.17 × | 3.43 × | 1.08 |
| 2.8 | | STYYNP | TYLGFDV | 10⁵ | 10⁻⁴ | |
| mAb6_ | TSSNYYW | SIDYTG | ATGKYYE | 2.99 × | 4.11 × | 1.37 |
| 2.9 | | STYYNP | TYLGFDV | 10⁵ | 10⁻⁴ | |
| mAb6_ | TSSNYYW | SIDYTG | ARGNYYE | 4.15 × | 1.03 × | 2.47 |
| 2.10 | | STYYQP | TYLGFDV | 10⁵ | 10⁻³ | |

[0349] F. mAb2 Affinity Maturation NNK Library Construction and Panning

[0350] To further improve the human IL-36α and human IL-36γ affinity of anti-IL-36 mAb2, phage libraries were constructed from mAb2 in Fab-amber format for monovalent Fab phage display with heavy chain HVR residues (i.e., HVR-H1, HVR-H2, and HVR-H3) randomized using the NNK degenerate codon that encodes for all 20 amino acids with 32 codons (Brenner et al., 1992) (with mAb2 light chain residues kept unchanged). Libraries were designed to allow one NNK mutation in each of the three heavy chain HVRs. Synthesized mutagenesis oligonucleotides were then used to construct heavy chain libraries using Kunkel mutagenesis (Kunkel et al., 1987). The resultant library DNA was electroporated into E. coli XL1 cells, yielding approximately 4×10⁹ transformants. Phage libraries were incubated in SUPERBLOCK™ PBS buffer (Pierce) and 0.05% TWEEN® 20 for 30 min and then applied on human IL-36α or human IL-36γ coated plates for first round panning. In the subsequent two to three rounds, phage libraries were incubated with decreasing concentrations of biotinylated human IL-36α or human IL-36γ with 1000× non-biotinylated human IL-36α or human IL-36γ as competitor in solution to increase the selection stringency.

[0351] G. Characterization of mAb2 Phage Variants from Affinity Maturation NNK Library

[0352] Selected phages with top binding signal were purified to perform phage competition ELISA. The optimal phage concentration was incubated with serially-diluted human IL-36α or human IL-36γ in ELISA buffer in NUNC F plate for two hours. 80 μl of the mixture was transferred to human IL-36α or human IL-36γ coated wells for 15 min to capture unbound phage. The plate was washed with wash buffer (0.05% TWEEN®20 in PBS), and HRP-conjugated anti-M13 antibody (Sino biological, Cat #11973-MM05-H-50) was added in ELISA buffer for 30 min. The plates were washed and developed as described above. The absorbance at 450 nm was plotted as a function of antigen concentration in solution to determine phage 1050. This was used as an affinity estimate for the Fab clone displayed on the surface of the phage. See Table 10 below for a summary of variant HVR sequences and phage IC₅₀.

TABLE 10
mAb2 HVR sequences and their IC₅₀ values
against hu-IL-36α and hu-IL-36γ.

| | | | | Phage | Phage |
|---|---|---|---|---|---|
| | | | | IC₅₀ | IC₅₀ |
| | | | | (nM) | (nM) |
| Vari- | HVR-H1 | HVR-H2 | HVR-H3 | hu-IL- | hu-IL- |
| ant | (30-35A) | (50-61) | (93-102) | 36α | 36γ |
| mAb | STSSYYW | SIYYTGN | ARVRYGVG | 1.20 | 3.20 |
| 2 | | TYYNP | VPRYFDP | | |
| mAb | SDSSYYW | SIYYTGN | ARVRYGVG | 1.03 | 4.86 |
| 2.1 | | TYYNS | VPRYFDP | | |
| mAb | SESSYYW | SIYYTGN | AGVRYGVG | 0.75 | 3.79 |
| 2.2 | | TYYNP | VPRYFDP | | |
| mAb | STSSDYW | SIYYTGN | SRVRYGVG | 0.82 | 2.39 |
| 2.3 | | TYYLP | VPRYFDP | | |
| mAb | SNSSYYW | SIYYTGN | ARVRYGVG | 0.68 | 1.52 |
| 2.4 | | TYYLP | VPRYFDP | | |
| mAb | SESSYYW | SIYYTGN | ARVRYGVG | 0.77 | 1.88 |
| 2.5 | | TYYLP | VPRYFDP | | |
| mAb | STSSYHW | SIYYTGN | VRVRYGVG | 1.62 | 1.99 |
| 2.6 | | TYYMP | VPRYFDP | | |
| mAb | SRSSYYW | SIYYTGN | TRVRYGVG | 1.20 | 1.53 |
| 2.7 | | TYYWP | VPRYFDP | | |

[0353] H. Next-Generation Sequencing of mAb2 Affinity Maturation Libraries

[0354] In order to further improve the affinity of mAb2, next-generation sequencing (NGS) of mAb2 affinity maturation libraries was performed. Phagemid double-stranded DNA was isolated from E. coli XL-1 cells carrying phagemids from the initial phage library (unsorted libraries) and from the second and third rounds of solution selection (sorted libraries). Purified DNA was used as the template to generate amplicons of VH regions using Illumina 16s library preparation protocol. Sequencing adapters and dual-index barcodes were added using Illumina Nextera XT Index Kit. In preparation for sequencing on Illumina MiSeq, adapter-ligated amplicons were subjected to standard Illumina library denaturing and sample loading protocol using MiSeq Reagent Kit v3 (600 cycles). Paired-end sequencing was performed to cover the entire length of the amplicon with insert size of 200 bp to 300 bp.

[0355] Paired-end sequencing data were first assembled using paired-end assembler PANDAseq (Masella et al., 2012) to obtain complete amplicons. Quality control (QC) was then performed on identified amplicons, where each amplicon was checked for no insertion or deletion of sequences and no stop codons, each CDR sequence was allowed to carry only up to one NNK mutation and no non-NNK mutation. Position weight matrices were generated by calculating the frequency of all mutations of every randomized position. Enrichment ratios for each mutation were calculated by dividing the frequency of a given mutation at a given position in the sorted sample with the frequency of the very same mutation in the unsorted sample, as described previously (Koenig et al., 2015). The predicted mutations in the HVRs that support the binding improvement of mAb2 to hu-IL-36α or hu-IL-36γ are summarized in Table 11.

TABLE 11
Predicted mutations in mAb2 supporting human
IL-36α and IL-36γ binding

| Domain | Position | Substitutions with Improved Binding |
|---|---|---|
| HVR-H1¹ | S30 | D |
| | T31 | A, D, E, G, H, K, N, P, Q, R, S |
| | S32 | D, E, G, K, N, P, R |
| | S33 | G, K, N, P |
| | Y34 | A, D, E, G, H, M, N, Q, S, T, V, W |
| | Y35 | A, F, G, H, M, N, Q |
| HVR-H2² | S50 | F, I, M, Q |
| | I51 | A, G, L, R, S, T, V |
| | Y52 | A, D, E, F, G, H, K, L, M, N, P, Q, R, S, T, W |
| | Y53 | A, D, E, F, G, H, K, N, P, Q, R, S, T, W |
| | T54 | D, E, K, N, P, Q |
| | G55 | Q |
| | N56 | D, E, G, H, I, K, M, P, R, S |
| | T57 | A, E, F, G, H, K, P, Q, R, S, V, W, Y |
| | Y58 | W |
| | N60 | A, D, E, K, L, M, P, Q, S, T |
| HVR-H3³ | A93 | V |
| | R94 | A, G, N, Q, T |
| | V95 | A, F, I, K, L, M, Q, S |
| | R96 | A, I, K, L, M, P, Q, S, T, V |
| | Y97 | H, I, L, V |
| | V99 | A, F, G, K, M, N, Q, R, S, T, W, Y |
| | G100 | N, R, S, T |
| | Y100D | F, H, I, L, M, Q, R |

¹HVR-H1 from positions 30-35A
²HVR-H2 from positions 50-61
³HVR-H3 from positions 93-102

[0356] I. Characterization of mAb2 Affinity Improved NGS Variants

[0357] Generation of mAb2 Affinity Improved NGS Fab Variants

[0358] According to predicted mutations from NGS analysis (Table 11 above) selected mAb2 NGS Fab HVR variant sequences (shown in Table 12 below) were synthesized for cloning into a mammalian Fab expression construct containing an 8×His tag to generate Fab proteins. Plasmids encoding the heavy or light chain were transfected into Expi293F cells (Thermo Fisher) using a 1:1 ratio of HC:LC. Fabs were purified with a HisPur Ni-NTA column by diluting supernatant 1.5× with 1× phosphate-buffered saline pH 7.2 (“PBS”), adding 10 mM imidazole, and binding to resin in batch mode for 2 hours. Resin was flowed over a column and washed with 20 CV PBS+20 mM imidazole and eluted with 5 CV PBS+250 mM imidazole. Samples were buffer exchanged to PBS using a PD10 column (GE).

TABLE 12
mAb2 NGS Fab variant HVR sequences

| Fab | HVR-H1 | HVR-H2 | HVR-H3 |
|---|---|---|---|
| Identifier | (30-35A) | (50-61) | (93-102) |
| mAb2 | STSSYYW | SIYYTGNTYYNP | ARVRYGVGVPRYFDP |
| mAb2.8 | SDSSYYW | SIYYTGETYYAP | ARLRYGVGVPRYFDP |
| mAb2.9 | SDSSYYW | SIYYTGETYYAP | ARVKYGVGVPRYFDP |
| mAb2.1 0 | SDSSYYW | SIYYTGETYYAP | ARVRYGVGVPRHFDP |
| mAb2.1 1 | SESSYYW | SIYYTGETYYAP | ARLRYGVGVPRYFDP |
| mAb2.1 2 | SESSYYW | SIYYTGETYYAP | ARVKYGVGVPRYFDP |

[0359] Affinity Determination of mAb2 Affinity-Improved NGS Fab Variants Using SPR

[0360] To determine the binding affinity of recombinant mAb2 NGS Fab variants to human IL-36a and human IL-36γ at 37° C., SPR measurements with a BIACORE™ 8K instrument were performed. Briefly, a 1:4 dilution of Biotin CAPture Reagent (GE) into HBS-EP buffer (0.01 M HEPES pH 7.4, 0.15 M NaCl, 3 mM EDTA, 0.005% Surfactant P20) was applied to a CAP sensor chip at 2 uL/min flow rate. For kinetics measurements, 3 nM biotinylated human IL-36α and human IL-36γ was captured at 10 uL/min to achieve ˜50 response units in the second flow cell (FC2). FC1 was kept as a reference. Next, 3-fold serial dilutions of Fab in HBS-P buffer (0.01 M HEPES pH 7.4, 0.15M NaCl, 0.005% surfactant P20) from low (3.125 nM) to high (200 nM) were injected (flow rate: 10 uL/min) at 37° C. The sensorgram was recorded and subject to reference and buffer subtraction before evaluating by BIACORE® 8K Evaluation Software (version 1.1.1.7442). Association rates (kₒₙ) and dissociation rates (k_{off}) were calculated using a simple one-to-one Langmuir binding model. The equilibrium dissociation constant (K_{D}) was calculated as the ratio of k_{off}/kₒₙ summarized in Table 13 below.

TABLE 13
mAb2 NGS Fab variants kₒₙ, k_{off} and K_{D} against hu-IL-36α and
hu-IL-36γ

| | hu-IL-36α | | | hu-IL-36γ | | |
|---|---|---|---|---|---|---|
| Fab | kₒₙ | k_{off} | K_{D} | kₒₙ | k_{off} | K_{D} |
| Identifier | (1/Ms) | (1/s) | (nM) | (1/Ms) | (1/s) | (nM) |
| mAb2 | 1.16E+06 | 2.64E−04 | 0.23 | 1.39E+06 | 5.74E−04 | 0.41 |
| mAb2.8 | 1.83E+06 | 2.54E−04 | 0.14 | 1.80E+06 | 3.01E−04 | 0.17 |
| mAb2.9 | 2.19E+06 | 2.60E−04 | 0.12 | 2.40E+06 | 5.65E−04 | 0.24 |
| mAb2.10 | 1.49E+06 | 2.22E−04 | 0.15 | 1.37E+06 | 1.80E−04 | 0.13 |
| mAb2.11 | 1.91E+06 | 2.44E−04 | 0.13 | 1.92E+06 | 2.14E−04 | 0.11 |
| mAb2.12 | 1.70E+06 | 2.77E−04 | 0.16 | 1.81E+06 | 5.03E−04 | 0.28 |

### Example 5: In Vitro Assessment of Blocking Activity of Anti-IL-36 Antibody Variants in Hu-IL-36-Stimulated IL-8 Secretion by HaCat Cells

[0361] To determine the blocking potency and efficacy of the affinity-matured mAb2 and mAb6_2 variants in vitro, we evaluated their ability of their recombinantly produced Fab fragments to inhibit hu-IL-36-stimulated IL-8 secretion by HaCat cells. HaCat cell assays were performed as described in Example 2 except that recombinantly expressed anti-IL-36 or control antibody Fab fragments were used as antagonists in place of IgG. Briefly, anti-IL-36 Fab, or an appropriate antibody Fab control (e.g., Hu IgG1 Ctrl), was incubated with HaCat cells for 1 hour at 37° C., followed by the addition of agonist (hu-IL-36α, hu-IL-36β, or hu-IL-36γ). The experiment was allowed to proceed for an additional 24 hours (37° C. with 5% CO₂), with cell culture supernatants collected and quantification of IL-8 performed as described in Example 2. Interpolated data was then analyzed using standard non-linear regression analysis in GraphPad Prism software to derive antibody IC₅₀ values.

TABLE 14
Blocking activity of affinity-matured anti-IL-36 antibody
variants in IL-36-stimulated IL-8 secretion by HaCat cells

| | IC₅₀ (nM) | | |
|---|---|---|---|
| Recombinant mAb | IL-36α | IL-36β | IL-36γ |
| mAb2 Fab | 0.3 | N.T | 0.96 |
| mAb2.10 Fab | 0.38 | N.T | 1.09 |
| mAb2.11 Fab | 0.42 | N.T | 1.05 |
| mAb6 Fab | N.T | 0.15 | N.T |
| mAb6_2 Fab | N.T | 3.19 | N.T |
| mAb6_2.1 Fab | N.T | 1.64 | N.T |
| mAb6_2.2 Fab | N.T | 2.22 | N.T |
| mAb6_2.3 Fab | N.T | 1.31 | N.T |
| mAb6_2.4 Fab | N.T | 0.13 | N.T |
| mAb6_2.5 Fab | N.T | 0.2 | N.T |
| mAb6_2.7 Fab | N.T | 0.2 | N.T |
| mAb6_2.8 Fab | N.T | 0.33 | N.T |

[0362] As shown in Table 14, mAb2.10 Fab demonstrated the most potent blocking activity of hu-IL-36α- and hu-IL-36γ-mediated IL-8 production in HaCat cells, with an IC₅₀ of approximately 0.38 nM and 1.09 nM, respectively. As further shown in Table 14, mAb6_2.7 Fab demonstrated improved blocking activity of IL-36β-mediated IL-8 production in HaCat cells, with an IC₅₀ of approximately 0.2 nM.

### Example 6: Generation of Anti-IL-36 Multispecific Antibody mAb2.10/mAb6_2.7

[0363] mAb2.10 and mAb6_2.7 heavy chains were cloned in a “knobs-into-holes” format (Ridgway et al, 1996) into pRK expression vector in a two-step cloning process. In step 1, mAb2.10 was synthesized and cloned into a pRK vector (using AgeI and BstEII) already containing hole mutations (T366S, L368A and Y407V) and a 8× His tag. mAb6_2.7 was synthesized and cloned into a pRK vector (using AgeI and BstEII) already containing knob mutation (T366W) and a Flag tag. mAb2 light chain was also cloned in pRK expression vector with no extra mutations. After a successful initial test of expression and purification of multispecific antibody with tagged constructs, in step 2 of the cloning process, tags were removed from mAb2.10 and mAb6_2.7 heavy chains. 8×His tag from mAb2.10 was completely removed using a set of primers (Forward Primer: 5′Phos-TAAGCTTGGCCGCCATGGCC-3′ (SEQ ID NO: 514) and Reverse Primer: 5′Phos-ACCCGGAGACAGGGAGAGGC-3′ (SEQ ID NO: 515)) whereas a stop codon TAA was inserted between mAb6_2.7 heavy chain and the Flag tag using a set of primers (Forward Primer: 5′-CTGTCTCCGGGTTAAGATTACAAGG-3′ (SEQ ID NO: 516) and Reverse Primer: 5′-CCTTGTAATCTTAACCCGGAGACAG-3′ (SEQ ID NO: 517)).

[0364] The multispecific common light chain antibody mAb2.10/mAb6_2.7 was expressed in Expi293F cells (Thermo Fisher Scientific, Waltham, Mass., USA) according to the manufacturer's protocol by co-transfecting plasmids at a mass ratio of 1:1:2 encoding the heavy chain of mAb2.10 containing hole mutations and N297G (SEQ ID NO: 235), the heavy chain of mAb6_2.7 containing knob mutations and N297G (SEQ ID NO:192), and the light chain of mAb2 (SEQ ID NO: 169). Cells were harvested after 4 days and the clarified supernatant was applied to MAbSelect Sure columns (GE Healthcare, Chicago, Ill., USA) equilibrated in PBS pH 7.5. Protein was eluted with 100 mM sodium citrate pH 3 and the pH neutralized by adding 1.5 M Tris-HCl pH 8.8. Protein containing fractions were pooled and buffer-exchanged into 50 mM Tris pH 8, 10 mM NaCl. The protein was then loaded onto a Capto S Impact column (GE Healthcare, Chicago, Ill., USA) equilibrated in 50 mM Tris pH 8, 10 mM NaCl and eluted with a 30 CV gradient of 50 mM Bis-Tris pH 6.5, 10 mM NaCl.

[0365] The intact mass of the purified multispecific antibody molecule was confirmed using a Q Exactive (Thermo Scientific) mass spectrometer in combination with an Ultimate-3000 (Thermo Scientific) liquid chromatography system. Purified antibody was injected on a PLRP-S column (Agilent) that was connected to the liquid chromatography system. The intact mass spectrometry analysis verified that the observed mass matched the predicted mass of the heterodimer. The absence of homodimer species was also confirmed by using the Fabricator enzyme (Genovis) that generated a homogenous pool of F(ab′)2 and Fc/2 fragments. Each fragment matched the predicted mass.

[0366] Capto S elution fractions containing mAb2.10/mAb6_2.7, as identified by intact mass spectrometry, were pooled, and loaded onto a Superdex 200pg column (GE Healthcare, Chicago, Ill., USA). Peak fractions containing monodisperse protein were pooled and stored in 1×PBS, pH 7.5.

### Example 7: Non-Specific Binding Assessment of Anti-IL-36 Multispecific Antibody mAb2.10/mAb6_2.7

[0367] Non-specific binding of multispecific molecule mAb2.10/mAb6_2.7 IgG was assessed using baculovirus ELISA (Hotzel et al., 2012). Briefly, baculovirus particles were coated on 96-well Maxisorp plates at a 3% suspension at 4° C. overnight. The plates were then blocked in PBS with 1% BSA and 0.05% Tween-20 at room temperature for one hour. mAb2.10/mAb6_2.7 IgG at 300 nM, 100 nM, and 33 nM in 1×PBS containing 0.5% BSA and 0.05% Tween 20 (ELISA buffer) were added to the plates for 1 hour and the plate was washed with 1×PBS with 0.05% Tween 20 (wash buffer). Bound antibodies were detected with goat anti-human IgG conjugated to horseradish peroxidase (Jackson ImmunoResearch) in ELISA buffer. The plate was incubated at room temperature for one hour with agitation, washed six times with wash buffer and developed for 15 minutes by addition of 100 μL/well of 1 Step Turbo TMB substrate (ThermoFisher, Cat #34022). Enzymatic reaction was stopped using 50 μL/well of 2 N H2504. Plates were analyzed using a Perkin Elmer plate reader (Envision 2103 multilabel reader) at 450 nm and compared to reference antibodies. Compared to positive control, multispecific molecule mAb2.10/mAb6_2.7 IgG showed no detectable baculovirus ELISA signal, indicating absence of non-specific binding to baculovirus particles (Table 15).

TABLE 15
Baculovirus ELISA evaluating non-specific binding of
multispecific anti-IL-36 antibody mAb2.10/mAb6_2.7 IgG

| Samples | 300 nM | 100 nM | 33 nM | 0 nM |
|---|---|---|---|---|
| Negative Control | 0.047 | 0.048 | 0.056 | 0.041 |
| Medium Positive | 0.386 | 0.164 | 0.081 | 0.039 |
| Control | | | | |
| mAb2.10/mAb6_2.7 | 0.073 | 0.053 | 0.045 | 0.040 |

### Example 8: In Vitro Assessment of Activity of Anti-Hu-IL-36 Multispecific Antibody mAb2.10/mAb6_2.7 IgG

[0368] Binding Kinetics of Anti-IL-36 Multispecific Antibody mAb2.10/mAb6 2.7

[0369] Surface plasmon resonance (SPR) analysis was used to determine the binding affinity for human and cynomolgus monkey IL-36 (“hu-IL-36” and “cy-IL-36,” respectively) using a BIACORE™ 8K instrument as described in Example 2. In-vivo biotinylated hu-IL-36α-Avi, hu-IL-36β-Avi, hu-IL-36γ-Avi, cy-IL-36α-Avi, cy-IL-36β-Avi, or cy-IL-36γ-Avi were analyzed separately for binding to mAb2.10/mAb6_2.7. Briefly, a 1:4 dilution of Biotin CAPture Reagent (GE Healthcare) into HBS-EP buffer (0.01 M HEPES pH 7.4, 0.15 M NaCl, 3 mM EDTA, 0.005% Surfactant P20) was applied to a CAP sensor chip at 2 μL/min flow rate. For kinetics measurements, 1 nM biotinylated human and cyno IL-36α-Avi, IL-36γ-Avi; 0.8 nM biotinylated human and cyno IL-36β-Avi were captured at 10 μL/min to achieve 15-25 response units in the second flow cell (FC2). FC1 was kept as a reference. Next, 2-fold serial dilutions of mAb2.10/mAb6_2.7 protein in HBS-P buffer (0.01 M HEPES pH 7.4, 0.15 M NaCl, 0.005% surfactant P20) from low (1.56 nM) to high (200 nM) were injected (flow rate: 30 μL/min) at either 25° C. or 37° C. The sensorgram was recorded and subject to reference and buffer subtraction before data analysis with the BIACORE® 8K Evaluation Software (version 1.1.1.7442). Since each multispecific IgG antibody contains only one Fab arm capable of binding to one IL-36 protein being assayed, the binding interaction is monovalent. Association rates (kₒₙ) and dissociation rates (k_{off}) were calculated using a simple one-to-one Langmuir binding model. The equilibrium dissociation constant (K_{D}) was calculated as the ratio of k_{off}/kₒₙ.

[0370] The Biacore affinity results for mAb2.10/mAb6_2.7 are summarized below in Table 16. mAb2.10/mAb6_2.7 binds to all human and cynomolgus monkey IL-36 cytokines with high and comparable affinities.

TABLE 16
Affinity of mAb2.10/mAb6_2.7 multispecific antibody for hu-IL-36
and cy-IL-36

| | 25° C. | | | 37° C. | | |
|---|---|---|---|---|---|---|
| | kₒₙ | k_{off} | K_{D} | kₒₙ | k_{off} | K_{D} |
| Ligand | (1/Ms) | (1/s) | (nM) | (1/Ms) | (1/s) | (nM) |
| hu-IL-36α | 1.34*10⁵ | 1.57*10⁻⁴ | 1.17 | 2.23*10⁵ | 4.34*10⁻⁴ | 1.95 |
| hu-IL-36β | 7.6*10⁴ | 4.77*10⁻⁵ | 0.63 | 9.14*10⁴ | 1.68*10⁻⁴ | 1.84 |
| hu-IL-36γ | 1.71*10⁵ | 1.22*10⁻⁴ | 0.72 | 2.1*10⁵ | 3.41*10⁻⁴ | 1.63 |
| cy-IL-36α | 1.74*10⁵ | 3.35*10⁻⁴ | 1.93 | 2.43*10⁵ | 6.25*10⁻⁴ | 2.57 |
| cy-IL-36β | 6.52*10⁴ | 6.32*10⁻⁵ | 0.97 | 8.69*10⁴ | 2.18*10⁻⁴ | 2.51 |
| cy-IL-36γ | 1.65*10⁵ | 1.3*10⁻⁴ | 0.79 | 1.58*10⁵ | 1.48*10⁻⁴ | 0.94 |

[0371] Blocking Activity of Multispecific Antibody mAb2.10/mAb6 2.7 in IL-36-Stimulated IL-8 Secretion by HaCat Cells

[0372] To determine the blocking potency and efficacy of the multispecific antibody mAb2.10/mAb6_2.7, we evaluated its ability to inhibit hu-IL-36-stimulated IL-8 secretion by HaCat cells. A human IgG isotype control (“Hu IgG1 Ctrl”) was also assayed to serve as a negative control. HaCat cell assays were performed as described in Example 2 except that recombinantly expressed mAb2.10/mAb6_2.7 or Hu IgG1 Ctrl were used as antagonists. Briefly, mAb2.10/mAb6_2.7, or an appropriate antibody control (e.g., Hu IgG1 Ctrl), was incubated with HaCat cells for 1 hour at 37° C., followed by the addition of agonist (hu-IL-36α, hu-IL-36β, or hu-IL-36γ). The experiment was allowed to proceed for an additional 24 hours (37° C. with 5% CO₂), with cell culture supernatants collected.

[0373] Quantification of IL-8 in supernatants performed using Cisbio Bioassay's, HTRF technology based human IL-8 assay. The assay was performed according to manufacturer guidelines. An HTRF compatible Spectramax (Molecular Devices) was used to obtain raw data and calculate the ratio of the acceptor to donor emission signals at 665 nm and 620 nm respectively in conjunction with SoftMax Pro software (Molecular Devices). The data obtained was analyzed using GraphPad Prism software, with interpolations performed using linear regression analysis and weighting defined by “Weight by 1/Y²”. Interpolated data was then analyzed using standard non-linear regression 3 parameter analysis to derive agonist EC₅₀ and antibody IC₅₀ values.

[0374] As shown in FIG. 3A, FIG. 3B, and FIG. 3C, mAb2.10/mAb6_2.7 demonstrated potent blocking activity of IL-36α-, IL-36β- and IL-36γ-mediated IL-8 production in HaCat cells, with IC₅₀ values of approximately 0.38 nM, 0.13 nM, and 1.1 nM, respectively. At 8 nM mAb2.10/mAb6_2.7, 100% of IL-36α-, IL-36β- and IL-36γ-mediated IL-8 production in HaCat cells was inhibited.

[0375] Blocking Activity of Multispecific Antibody mAb2.10/mAb6 2.7 in IL-36-Stimulated IL-8 Secretion by Primary Human Keratinocytes

[0376] To determine the blocking potency and efficacy of the multispecific antibody mAb2.10/mAb6_2.7 on primary human cells, we evaluated its ability to inhibit hu-IL-36-stimulated IL-8 secretion by primary adult human keratinocytes. A human IgG isotype control (“Hu IgG1 Ctrl”) was also assayed to serve as a negative control. Adult normal human epidermal keratinocytes were obtained from Lonza. Cells were isolated from normal (disease free) donated human tissue and cryopreserved by the manufacturer. The cells were thawed and maintained using the general guidelines recommended by the manufacturer. HEKa cells were maintained in a growth medium consisting of supplemented keratinocyte growth media from the Gold BulletKit (Lonza). The day prior to experimental use, HEKa were seeded on flat-bottom, 96-well plates at 10,000 cells/well to be at ˜80-85% confluency the day of use. Primary keratinocyte cell assays were performed as described in Example 2 with adult human keratinocytes (HEKa), except that recombinantly expressed mAb2.10/mAb6_2.7 or Hu IgG1 Ctrl were used as antagonists. Briefly, mAb2.10/mAb6_2.7, or an appropriate antibody control (e.g., Hu IgG1 Ctrl), was incubated with HEKa cells for 1 hour at 37° C., followed by the addition of agonist (hu-IL-36α, hu-IL-36β, or hu-IL-36γ). The experiment was allowed to proceed for an additional 24 hours (37° C. with 5% CO₂), with cell culture supernatants collected and quantification of IL-8 performed using Cisbio Bioassay's, HTRF technology based human IL-8 assay as described above. Interpolated data was then analyzed using standard non-linear regression analysis in GraphPad Prism software to derive antibody IC₅₀ values.

[0377] As shown in FIG. 4A, FIG. 4B, and FIG. 4C, mAb2.10/mAb6_2.7 demonstrated potent blocking activity of IL-36α-, IL-36β- and IL-36γ-mediated IL-8 production in primary human adult keratinocytes, with IC₅₀ values of approximately 0.56 nM, 0.11 nM, and 2.7 nM, respectively. At 8 nM mAb2.10/mAb6_2.7, 100% of IL-36α-, IL-36β- and IL-36γ-mediated IL-8 production in primary human adult keratinocytes was inhibited. This example demonstrates that the potency of mAb2.10/mAb6_2.7 on primary human cells is similar to that observed on the human keratinocyte cell line HaCat.

[0378] To demonstrate the independent blocking activity of the Fab arms in the multispecific antibody mAb2.10/mAb6_2.7 we evaluated its ability to inhibit IL-8 secretion by primary adult human keratinocytes stimulated by a mixture of hu-IL-36α and hu-IL-36β using methods similar to those described above with the following modification. mAb2.10/mAb6_2.7, or an appropriate antibody control (e.g., Hu IgG1 Ctrl), was incubated with HEKa cells for 1 hour at 37° C., followed by the addition of agonists (hu-IL-36α individually, hu-IL-36β individually, or a mixture of hu-IL-36α and hu-IL-36β at approximately the EC₅₀ of each cytokine). mAb2.10/mAb6_2.7 demonstrated potent blocking activity of a mixture of IL-36α and IL-36β, with an IC₅₀ value of approximately 0.44 nM. The IC₅₀ values of mAb2.10/mAb6_2.7 against IL-36α and IL-36β individually were consistent with the blocking IC₅₀ values reported for primary human adult keratinocytes above in this example, demonstrating that the IL-36α/IL-36γ- and IL-36β-targeting Fab arms of mAb2.10/mAb6_2.7 potently and independently neutralize IL-36α, IL-36β and IL-36γ.

[0379] To determine the potency and efficacy of the multispecific antibody mAb2.10/mAb6_2.7 against a mixture of IL-36 agonist cytokines, we evaluated the ability of the antibody to block signaling by a mixture of IL-36α, IL-36β and IL-36γ on primary cells. The ability of mAb2.10/mAb6_2.7 to inhibit IL-8 secretion by primary adult human keratinocytes stimulated by mixtures of hu-IL-36α, hu-IL-36β and IL-36γ was assessed using methods similar to those described above with the following modifications. mAb2.10/mAb6_2.7, or an appropriate antibody control (e.g., Hu IgG1 Ctrl), was incubated with HEKa cells for 1 hour at 37° C., followed by the addition of a mixture of agonists (hu-IL-36α, hu-IL-36β, and hu-IL-36γ at approximately the EC₅₀-EC₆₅ of each cytokine). The IC₅₀ value of mAb2.10/mAb6_2.7 was determined to be 1.16 nM by titrating it in the presence of the described cytokine mixture, demonstrating potent blocking activity in mixtures containing IL-36α, IL-36β, and IL-36γ.

[0380] Notwithstanding the appended claims, the disclosure set forth herein is also defined by the following clauses, which may be beneficial alone or in combination, with one or more other causes or embodiments. Without limiting the foregoing description, certain non-limiting clauses of the disclosure numbered as below are provided, wherein each of the individually numbered clauses may be used or combined with any of the preceding or following clauses. Thus, this is intended to provide support for all such combinations and is not necessarily limited to specific combinations explicitly provided below:

1. An anti-IL-36 antibody comprising: (i) a first light chain hypervariable region (HVR-L1), a second light chain hypervariable region (HVR-L2), and a third light chain hypervariable region (HVR-L3), and/or (ii) a first heavy chain hypervariable region (HVR-H1), a second heavy chain hypervariable region (HVR-H2), and a third heavy chain hypervariable region (HVR-H3); wherein:

[0381] (a) HVR-L1 comprises an amino acid sequence selected from TGSSSNIGAHYDVH (SEQ ID NO: 18), TGSSSNIGAGYDVH (SEQ ID NO: 22), RASQSVSSNYLA (SEQ ID NO: 38), or RASQTIYKYLN (SEQ ID NO: 42);

[0382] (b) HVR-L2 comprises an amino acid sequence selected from SNNNRPS (SEQ ID NO: 15), GNDNRPS (SEQ ID NO: 19), GNTNRPS (SEQ ID NO: 23), GNRNRPS (SEQ ID NO: 27), SASSLQS (SEQ ID NO: 39), or AASSLQS (SEQ ID NO: 43);

[0383] (c) HVR-L3 comprises an amino acid sequence selected from QSYDYSLRGYV (SEQ ID NO: 16), QSYDYSLSGYV (SEQ ID NO: 20), QSYDYSLRVYV (SEQ ID NO: 28), QSYDYSLKAYV (SEQ ID NO: 32), QSYDISLSGWV (SEQ ID NO: 36), QQTYSYPPT (SEQ ID NO: 40), or QQSSIPYT (SEQ ID NO: 44);

[0384] (d) HVR-H1 comprises an amino acid sequence selected from SAYAMHW (SEQ ID NO: 46), STSSYYW (SEQ ID NO: 50), SSTSYYW (SEQ ID NO: 54), GSRSYYW (SEQ ID NO: 58), STYAMSW (SEQ ID NO: 62), TSSNYYW (SEQ ID NO: 66), SSYGMH (SEQ ID NO: 70), SNYAIS (SEQ ID NO: 74), TSTNYYW (SEQ ID NO: 82), TSSNAYW (SEQ ID NO: 86), TASNYYW (SEQ ID NO: 90), TASNTYW (SEQ ID NO: 106), SDSSYYW (SEQ ID NO: 122), SESSYYW (SEQ ID NO: 126), STSSDYW (SEQ ID NO: 130), SNSSYYW (SEQ ID NO: 134), STSSYHW (SEQ ID NO: 142), SRSSYYW (SEQ ID NO: 146), XXXNXYX (SEQ ID NO: 251) wherein X at position 1 is T, D, E, or N; X at position 2 is S, A, E, G, K, Q, R, or T; X at position 3 is S, A, D, E, G, N, P, Q, or T; X at position 5 is Y, A, E, G, H, M, N, Q, S, T, or V; X at position 7 is W, F, I, V, or Y, or XXXXXXW (SEQ ID NO: 336) wherein X at position 1 is S or D; X at position 2 is T, A, D, E, G, H, K, N, P, Q, R, or S; X at position 3 is S, D, E, G, K, N, P, or R; X at position 4 is S, G, K, N, or P; X at position 5 is Y, A, D, E, G, H, M, N, Q, S, T, V, or W; X at position 6 is Y, A, F, G, H, M, N, or Q;

[0385] (e) HVR-H2 comprises an amino acid sequence selected from VISYDGTNEYYAD (SEQ ID NO: 47), SIYYTGNTYYNP (SEQ ID NO: 51), SIHYSGNTYYNP (SEQ ID NO: 55), SIHYSGTTYYNP (SEQ ID NO: 59), GISGGSGYTYYAD (SEQ ID NO: 63), SIDYTGSTYYNP (SEQ ID NO: 67), VISYGGSERYYAD (SEQ ID NO: 71), GILPILGTVDYAQ (SEQ ID NO: 75), NIDYTGSTYYNA (SEQ ID NO: 83), SIDYTGSTAYNP (SEQ ID NO: 87), SIDYTGSTYYNT (SEQ ID NO: 91), SIDYTGSTYYEP (SEQ ID NO: 99), SIDYTGSTYYEP (SEQ ID NO: 103), SIDYTGSTYYQP (SEQ ID NO: 119), SIYYTGNTYYNS (SEQ ID NO: 123), SIYYTGNTYYLP (SEQ ID NO: 131), SIYYTGNTYYMP (SEQ ID NO: 143), SIYYTGNTYYWP (SEQ ID NO: 147), SIYYTGETYYAP (SEQ ID NO: 151), XXDXXXXXXYXX (SEQ ID NO: 284) wherein X at position 1 is S, N, or T; X at position 2 is I, M, or V; X at position 4 is Y, or H; X at position 5 is T, H, L, or N; X at position 6 is G, A, D, E, H, K, N, Q, R, S, or T; X at position 7 is S, A, D, Q, or T; X at position 8 is T, A, D, or E; X at position 9 is Y, A, F, Q, S, or W; X at position 11 is N, D, E, H, P, or Q; X at position 12 is P, A, or E, or XXXXXXXXXYXP (SEQ ID NO: 379) wherein X at position 1 is S, F, I, M, or Q; X at position 2 is I, A, G, L, R, S, T, or V; X at position 3 is Y, A, D, E, F, G, H, K, L, M, N, P, Q, R, S, T, or W; X at position 4 is Y, A, D, E, F, G, H, K, N, P, Q, R, S, T, or W; X at position 5 is T, D, E, K, N, P, or Q; X at position 6 is G or Q; X at position 7 is N, D, E, G, H, I, K, M, P, R, or S; X at position 8 is T, A, E, F, G, H, K, P, Q, R, S, V, W, or Y; X at position 9 is Y or W; X at position 11 is N, A, D, E, K, L, M, P, Q, S or T;

[0386] (f) HVR-H3 comprises an amino acid sequence selected from ARGIRIFTSYFDS (SEQ ID NO: 48), ARVRYGVGVPRYFDP (SEQ ID NO: 52), ARVHYGGYIPRRFDH (SEQ ID NO: 56), ARVAPSYPRVFDY (SEQ ID NO: 60), ARVVTYRDPPASFDY (SEQ ID NO: 64), ARGKYYETYLGFDV (SEQ ID NO: 68), AREPWYSSRGWTGYGFDV (SEQ ID NO: 72), AREPWYRLGAFDV (SEQ ID NO: 76), ATGKYYETYLGFDV (SEQ ID NO: 84), AHGKYYETYLGFDV (SEQ ID NO: 88), ATGSYYETYLGFDV (SEQ ID NO: 100), ATGNYYETYLGFDV (SEQ ID NO: 104), ASGKYYETYLGFDV (SEQ ID NO: 112), ARGNYYETYLGFDV (SEQ ID NO: 120), AGVRYGVGVPRYFDP (SEQ ID NO: 128), SRVRYGVGVPRYFDP (SEQ ID NO: 132), VRVRYGVGVPRYFDP (SEQ ID NO: 144), TRVRYGVGVPRYFDP (SEQ ID NO: 148), ARLRYGVGVPRYFDP (SEQ ID NO: 152), ARVKYGVGVPRYFDP (SEQ ID NO: 156), ARVRYGVGVPRHFDP (SEQ ID NO: 160), AXGXYYXTYLGFDV (SEQ ID NO: 322) wherein X at position 2 is R, A, E, G, H, M, N, Q, S, T, or Y; X at position 4 is K, A, or S; X at position 7 is E or T, or XXXXXGXXVPRXFDP (SEQ ID NO: 462) wherein X at position 1 is A or V; X at position 2 is R, A, G, N, Q, or T; X at position 3 is V, A, F, I, K, L, M, Q, or S; X at position 4 is R, A, I, K, L, M, P, Q, S, T, or V; X at position 5 is Y, H, I, L, or V; X at position 7 is V, A, F, G, K, M, N, Q, R, S, T, W, or Y; X at position 8 is G, N, R, S, or T; X at position 12 is Y, F, H, I, L, M, Q, or R.

2. The antibody of clause 1, wherein:

[0387] (a) HVR-L1 comprises the amino acid sequence of SEQ ID NO: 18;

[0388] (b) HVR-L2 comprises the amino acid sequence of SEQ ID NO: 19; and

[0389] (c) HVR-L3 comprises the amino acid sequence of SEQ ID NO: 20.

3. The antibody of any one of clauses 1-2, wherein:

[0390] (a) HVR-H1 comprises the amino acid sequence selected from SEQ ID NO: 66, 82, 86, 90, or 252-283;

[0391] (b) HVR-H2 comprises the amino acid sequence selected from SEQ ID NO: 67, 83, 87, 91, 99, 103, 119, or 285-321; and

[0392] (c) HVR-H3 comprises the amino acid sequence selected from SEQ ID NO: 68, 84, 88, 100, 104, 112, 120, or 323-335.

4. The antibody of any one of clauses 1-2, wherein:

[0393] (a) HVR-H1 comprises an amino acid sequence selected from SEQ ID NO: 50, 122, 126, 130, 134, 138, 142, 146, or 337-378;

[0394] (b) HVR-H2 comprises an amino acid sequence selected from SEQ ID NO: 51, 123, 131, 143, 147, 151, or 380-461; and

[0395] (c) HVR-H3 comprises an amino acid sequence selected from SEQ ID NO: 52, 128, 132, 144, 148, 152, 156, 160, or 463-513.

5. The antibody of clause 1, wherein:

[0396] (a) HVR-L1 comprises the amino acid sequence of SEQ ID NO: 18;

[0397] (b) HVR-L2 comprises the amino acid sequence of SEQ ID NO: 19;

[0398] (c) HVR-L3 comprises the amino acid sequence of SEQ ID NO: 20;

[0399] (d) HVR-H1 comprises the amino acid sequence selected from SEQ ID NO: 66, 82, 86, 90, or 252-283;

[0400] (e) HVR-H2 comprises the amino acid sequence selected from SEQ ID NO: 67, 83, 87, 91, 99, 103, 119, or 285-321; and

[0401] (f) HVR-H3 comprises the amino acid sequence selected from SEQ ID NO: 68, 84, 88, 100, 104, 112, 120, or 323-335.

6. The antibody of clause 1, wherein:

[0402] (a) HVR-L1 comprises the amino acid sequence of SEQ ID NO: 18;

[0403] (b) HVR-L2 comprises the amino acid sequence of SEQ ID NO: 19;

[0404] (c) HVR-L3 comprises the amino acid sequence of SEQ ID NO: 20;

[0405] (d) HVR-H1 comprises an amino acid sequence selected from SEQ ID NO: 50, 122, 126, 130, 134, 138, 142, 146, or 337-378;

[0406] (e) HVR-H2 comprises an amino acid sequence selected from SEQ ID NO: 51, 123, 131, 143, 147, 151, or 380-461; and

[0407] (f) HVR-H3 comprises an amino acid sequence selected from SEQ ID NO: 52, 128, 132, 144, 148, 152, 156, 160, or 463-513.

7. The antibody of any one of clauses 1-6, wherein the antibody comprises a light chain variable domain (V_{L}) amino acid sequence having at least 90% identity to a sequence selected from SEQ ID NO: 13, 17, 21, 25, 29, 33, 37, 41, 77, or 78; and/or a heavy chain variable domain (V_{H}) amino acid sequence having at least 90% identity to a sequence selected from SEQ ID NO: 45, 49, 53, 57, 61, 65, 69, 73, 79, 80, 81, 85, 89, 93, 97, 101, 105, 109, 113, 117, 121, 125, 129, 133, 137, 141, 145, 149, 153, 157, 161, or 165.
8. The antibody of any one of clauses 1-6, wherein the antibody comprises a light chain variable domain (V_{L}) amino acid sequence having at least 90% identity to SEQ ID NO: 17 or 77; and/or a heavy chain variable domain (V_{H}) amino acid sequence having at least 90% identity to a sequence selected from SEQ ID NO: 49, 65, 79, 80, 81, 85, 89, 93, 97, 101, 105, 109, 113, 117, 121, 125, 129, 133, 137, 141, 145, 149, 153, 157, 161, or 165.
9. The antibody of any one of clauses 1-6, wherein the antibody comprises a light chain variable domain (V_{L}) amino acid sequence having at least 90% identity to SEQ ID NO: 17 or 77; and/or a heavy chain variable domain (V_{H}) amino acid sequence having at least 90% identity to a sequence selected from SEQ ID NO: 65, 80, 81, 85, 89, 93, 97, 101, 105, 109, 113, or 117.
10. The antibody of any one of clauses 1-6, wherein the antibody comprises a light chain variable domain (V_{L}) amino acid sequence having at least 90% identity to SEQ ID NO: 17 or 77; and/or a heavy chain variable domain (V_{H}) amino acid sequence having at least 90% identity to a sequence selected from SEQ ID NO: 49, 79, 121, 125, 129, 133, 137, 141, 145, 149, 153, 157, 161, or 165.
11. The antibody of any one of clauses 1-10, wherein the antibody comprises a light chain (LC) amino acid sequence having at least 90% identity to SEQ ID NO: 169 or 242; and/or a heavy chain (HC) amino acid sequence having at least 90% identity to a sequence selected from SEQ ID NO: 170-202, 248-250, 518-616, and 743-751.
12. The antibody of any one of clauses 1-10, wherein the antibody comprises a light chain (LC) amino acid sequence having at least 90% identity to SEQ ID NO: 169 or 242; and/or a heavy chain (HC) amino acid sequence having at least 90% identity to a sequence selected from SEQ ID NO: 203-241, and 617-733.
13. An anti-IL-36 antibody comprising a light chain variable domain (V_{L}) amino acid sequence having at least 90% identity to a sequence selected from SEQ ID NO: 13, 17, 21, 25, 29, 33, 37, 41, 77, or 78; and/or a heavy chain variable domain (V_{H}) amino acid sequence having at least 90% identity to a sequence selected from SEQ ID NO: 45, 49, 53, 57, 61, 65, 69, 73, 79, 80, 81, 85, 89, 93, 97, 101, 105, 109, 113, 117, 121, 125, 129, 133, 137, 141, 145, 149, 153, 157, 161, or 165.
14. An anti-IL-36 antibody comprising a light chain variable domain (V_{L}) amino acid sequence selected from SEQ ID NO: 13, 17, 21, 25, 29, 33, 37, 41, 77, or 78; and/or a heavy chain variable domain (V_{H}) amino acid sequence selected from SEQ ID NO: 45, 49, 53, 57, 61, 65, 69, 73, 79, 80, 81, 85, 89, 93, 97, 101, 105, 109, 113, 117, 121, 125, 129, 133, 137, 141, 145, 149, 153, 157, 161, or 165.
15. An anti-IL-36 antibody comprising a light chain variable domain (V_{L}) amino acid sequence having at least 90% identity to SEQ ID NO: 17 or 77; and/or a heavy chain variable domain (V_{H}) amino acid sequence having at least 90% identity to a sequence selected from SEQ ID NO: 49, 65, 79, 80, 81, 85, 89, 93, 97, 101, 105, 109, 113, 117, 121, 125, 129, 133, 137, 141, 145, 149, 153, 157, 161, or 165.
16. An anti-IL-36 antibody comprising a light chain variable domain (V_{L}) amino acid sequence of SEQ ID NO: 17 or 77; and/or a heavy chain variable domain (V_{H}) amino acid sequence selected from SEQ ID NO: 49, 65, 79, 80, 81, 85, 89, 93, 97, 101, 105, 109, 113, 117, 121, 125, 129, 133, 137, 141, 145, 149, 153, 157, 161, or 165.
17. An anti-IL-36 antibody comprising a light chain variable domain (V_{L}) amino acid sequence having at least 90% identity to SEQ ID NO: 17 or 77; and/or a heavy chain variable domain (V_{H}) amino acid sequence having at least 90% identity to a sequence selected from SEQ ID NO: 65, 80, 81, 85, 89, 93, 97, 101, 105, 109, 113, or 117.
18. An anti-IL-36 antibody comprising a light chain variable domain (V_{L}) amino acid sequence of SEQ ID NO: 17 or 77; and/or a heavy chain variable domain (V_{H}) amino acid sequence selected from SEQ ID NO: 65, 80, 81, 85, 89, 93, 97, 101, 105, 109, 113, or 117.
19. An anti-IL-36 antibody comprising a light chain variable domain (V_{L}) amino acid sequence having at least 90% identity to SEQ ID NO: 17 or 77; and/or a heavy chain variable domain (V_{H}) amino acid sequence having at least 90% identity to a sequence selected from SEQ ID NO: 49, 79, 121, 125, 129, 133, 137, 141, 145, 149, 153, 157, 161, or 165.
20. An anti-IL-36 antibody comprising a light chain variable domain (V_{L}) amino acid sequence of SEQ ID NO: 17 or 77; and/or a heavy chain variable domain (V_{H}) amino acid sequence selected from SEQ ID NO: 49, 79, 121, 125, 129, 133, 137, 141, 145, 149, 153, 157, 161, or 165.
21. An anti-IL-36 antibody comprising a light chain (LC) amino acid sequence having at least 90% identity to SEQ ID NO: 169 or 242; and/or a heavy chain (HC) amino acid sequence having at least 90% identity to a sequence selected from SEQ ID NO: 170-202, 248, 249-250, 518-616, and 743-751.
22. An anti-IL-36 antibody comprising a light chain (LC) amino acid sequence of SEQ ID NO: 169 or 242; and/or a heavy chain (HC) amino acid sequence selected from SEQ ID NO: 170-202, 248-250, 518-616, and 743-751.
23. An anti-IL-36 antibody comprising a light chain (LC) amino acid sequence having at least 90% identity to SEQ ID NO: 169 or 242; and/or a heavy chain (HC) amino acid sequence having at least 90% identity to a sequence selected from SEQ ID NO: 203-241, and 617-733.
24. An anti-IL-36 antibody comprising a light chain (LC) amino acid sequence of SEQ ID NO: 169 or 242; and/or a heavy chain (HC) amino acid sequence selected from SEQ ID NO: 206-241.
25. An anti-IL-36 antibody, wherein the antibody is a multispecific antibody comprising:

[0408] (a) a pair of light chains each comprising: HVR-L1 sequence of SEQ ID NO: 18; HVR-L2 sequence of SEQ ID NO: 19; and HVR-L3 sequence of SEQ ID NO: 20;

[0409] (b) a heavy chain comprising: HVR-H1 sequence selected from SEQ ID NOs: 66, 82, 86, 90, or 106; HVR-H2 sequence selected from SEQ ID NOs: 67, 83, 87, 91, 99, 103, or 119; and HVR-H3 sequence selected from SEQ ID NOs: 68, 84, 88, 100, 104, 112, or 120; and

[0410] (c) a heavy chain comprising: HVR-H1 sequence selected from SEQ ID NOs: 50, 122, 126, 130, 134, 142, or 146; HVR-H2 sequence selected from SEQ ID NOs: 51, 123, 127, 131, 135, 139, 143, 147, or 151; and HVR-H3 comprises an amino acid sequence selected from SEQ ID NOs: 52, 128, 132, 144, 148, 152, 156, or 160.

26. The antibody of clause 25 wherein one of the heavy chains comprises an amino acid substitution T366W and the other heavy chain comprises amino acid substitutions T366S, L368A and Y407V.
27. An anti-IL-36 antibody, wherein the antibody is a multispecific antibody comprising:

[0411] (a) a pair of light chains each comprising a light chain variable domain (V_{L}) amino acid sequence of SEQ ID NO: 17 or 77;

[0412] (b) a heavy chain comprising a heavy chain variable domain (V_{H}) amino acid sequence selected from SEQ ID NO: 65, 80, 81, 85, 89, 93, 97, 101, 105, 109, 113, or 117; and

[0413] (c) a heavy chain comprising a heavy chain variable domain (V_{H}) amino acid sequence selected from SEQ ID NO: 49, 79, 121, 125, 129, 133, 137, 141, 145, 149, 153, 157, 161, or 165.

28. An anti-IL-36 antibody, wherein the antibody is a multispecific antibody comprising:

[0414] (a) a pair of light chain (LC) amino acid sequences of SEQ ID NO: 169 and 242;

[0415] (b) a heavy chain (HC) amino acid sequence selected from SEQ ID NO: 171, 174, 177, 180, 183, 186, 189, 192, 195, 198, 201, and 249; and

[0416] (c) a heavy chain (HC) amino acid sequence selected from SEQ ID NO: 208, 211, 214, 217, 220, 223, 226, 229, 232, 235, 238, and 241.

[0417] 29. An anti-IL-36 antibody, wherein the antibody is a multispecific antibody comprising:

[0418] (a) a pair of light chain (LC) amino acid sequences of SEQ ID NO: 169 and 242;

[0419] (b) a heavy chain (HC) amino acid sequence selected from SEQ ID NO: 172, 175, 178, 181, 184, 187, 190, 193, 196, 199, 202, 250; and

[0420] (c) a heavy chain (HC) amino acid sequence selected from SEQ ID NO: 207, 210, 213, 216, 219, 222, 225, 228, 231, 234, 237, and 240.

30. A multispecific anti-IL-36 antibody, wherein the antibody comprises a pair of light chain (LC) amino acid sequences of SEQ ID NO: 169; a heavy chain (HC) amino acid sequence of SEQ ID NO: 192; and a heavy chain (HC) amino acid sequence of SEQ ID NO: 235.
31. The antibody of any one of clauses 1-30, wherein the antibody is a multispecific antibody comprising a specificity for IL-36α and IL-36γ in one arm, and a specificity for IL-36β in the other arm.
32. The antibody of any one of clauses 1-31, wherein the antibody binds to hu-IL-36α, hu-IL-36-β, and/or hu-IL-36-γ with a binding affinity of 1×10⁻⁸ M or less, 1×10⁻⁹M or less, 1×10⁻¹⁰ M or less, or 1×10⁻¹¹M or less.
33. The antibody of any one of clauses 1-32, wherein the antibody binds to hu-IL-36α and hu-IL-36-γ with a binding affinity of 1×10⁻⁸ M or less, 1×10⁻⁹M or less, 1×10⁻¹⁰ M or less, or 1×10⁻¹¹M or less.
34. The antibody of any one of clauses 1-33, wherein the antibody binds to hu-IL-36-β with a binding affinity of 1×10⁻⁸ M or less, 1×10⁻⁹M or less, 1×10⁻¹⁰ M or less, or 1×10⁻¹¹M or less.
35. The antibody of any one of clauses 1-34, wherein the antibody decreases an intracellular signal stimulated by IL-36α, IL-36β, and/or IL-36γ by at least 90%, at least 95%, at least 99%, or 100%; optionally, wherein at an IL-36α, IL-36β, and/or IL-36γ concentration of about EC₅₀ the antibody has an IC₅₀ of 10 nM or less, 5 nM or less, or 1 nM or less.
36. The antibody of any one of clauses 1-35, wherein the antibody inhibits release of IL-8 from primary human keratinocytes (PHKs) stimulated by IL-36α, IL-36β, and/or IL-36γ, optionally, wherein at an IL-36α, IL-36β, and/or IL-36γ concentration of about EC₅₀ the antibody has an IC₅₀ of 10 nM or less, 5 nM or less, or 1 nM or less.
37. The antibody of any one of clauses 1-36, wherein the antibody cross-reacts with an IL-36α, IL-36β, or IL-36γ of cynomolgus monkey of SEQ ID NO: 5, 6, or 7.
38. The antibody of any one of clauses 1-37, wherein the antibody is a monoclonal antibody.
39. The antibody of any one of clauses 1-38, wherein the antibody is a recombinant antibody.
40. The antibody of any one of clauses 1-39, wherein the antibody is a chimeric antibody.
41. The antibody of any one of clauses 1-39, wherein the antibody is a humanized or human antibody.
42. The antibody of any one of clauses 1-41, wherein the antibody is an antibody fragment, optionally selected from the group consisting of F(ab′)₂, Fab′, Fab, Fv, single domain antibody (VHH), single-arm antibody, and scFv.
43. The antibody of any one of clauses 1-42, wherein the antibody is a full-length antibody of class IgG; optionally, wherein the class IgG antibody has an isotype selected from IgG1, IgG2, IgG3, and IgG4.
44. The antibody of clause 43, wherein the antibody is an Fc region variant; optionally wherein the Fc region variant alters effector function or alters half-life.
45. The antibody of clause 44, wherein the Fc region variant decreases effector function and/or results in an effectorless antibody; optionally, wherein the Fc region variant comprises an amino acid substitution at position 297 resulting in effectorless function.
46. The antibody of any one of clauses 1-45, wherein the antibody is an immunoconjugate; optionally, wherein the immunoconjugate comprises a therapeutic agent for treatment of IL-36 mediated condition or disease; optionally, wherein the therapeutic agent is a chemotherapeutic agent or cytotoxic agent for the treatment of cancer.
47. The antibody of any one of clauses 1-47, wherein the antibody is a synthetic antibody comprising the CDRs grafted onto a scaffold other than an immunoglobulin scaffold or immunoglobulin framework, optionally a scaffold selected from an alternative protein scaffold, and an artificial polymer scaffold.
48. An anti-IL-36 antibody that specifically binds to the same epitope as the antibody of any one of clauses 1-48.
49. A multispecific antibody that binds to each of human IL-36α, IL-36β, and IL-36γ; optionally, wherein the antibody binds to each of human IL-36α, IL-36β, and IL-36γ with a binding affinity of 3 nM or less; optionally wherein the binding affinity is measured by equilibrium dissociation constant (K_{D}) to a hu-IL-36α of SEQ ID NO:1, a hu-IL-36β of SEQ ID NO:2, and a hu-IL-36γ of SEQ ID NO:3; optionally, wherein:

[0421] (a) comprises a specificity for IL-36α and/or IL-36γ in one arm, and a specificity for IL-36β in the other arm; optionally, wherein one arm binds to hu-IL-36α and hu-IL-36-γ with a binding affinity of 1×10⁻⁹M or less, 1×10⁻¹⁰ M or less, or 1×10⁻¹¹M or less, and the other arm binds to hu-IL-36-β with a binding affinity of 1×10⁻⁹ M or less, 1×10⁻¹⁰ M or less, or 1×10⁻¹¹ M or less;

[0422] (b) decreases an intracellular signal stimulated by IL-36α, IL-36β, and/or IL-36γ by at least 90%, at least 95%, at least 99%, or 100%; optionally, wherein at an IL-36α, IL-36β, and/or IL-36γ concentration of about EC₅₀ the antibody has an IC₅₀ of 10 nM or less, 5 nM or less, or 1 nM or less;

[0423] (c) inhibits release of IL-8 from primary human keratinocytes (PHKs) stimulated by IL-36α, IL-36β, and/or IL-36γ, optionally, wherein at an IL-36α, IL-36β, and/or IL-36γ concentration of about EC₅₀ the antibody has an IC₅₀ of 10 nM or less, 5 nM or less, or 1 nM or less;

[0424] (d) the antibody cross-reacts with an IL-36α, IL-36β, and IL-36γ of cynomolgus monkey; and/or

[0425] (e) the antibody binds to each of cynomolgus monkey IL-36α, IL-36β, and IL-36γ with a binding affinity of 3 nM or less; optionally wherein the binding affinity is measured by equilibrium dissociation constant (K_{D}) to a cy-IL-36α of SEQ ID NO:5, a cy-IL-36β of SEQ ID NO:6, and a cy-IL-36γ of SEQ ID NO:7.

50. An isolated polynucleotide encoding the antibody of any one of clauses 1-49.
51. The polynucleotide of clause 50, further comprising a nucleotide sequence encoding a signal peptide (SP).
52. The polynucleotide of clause 50, wherein the polynucleotide encodes a light chain and a heavy chain.
53. The polynucleotide of clause 50, wherein the polynucleotide comprises a polynucleotide sequence comprising one or more codons selected for optimal expression of the antibody in a mammalian cell.
54. The polynucleotide of clause 50, wherein the polynucleotide sequence comprises one or more codons selected for optimal expression of the antibody in a Chinese Hamster Ovary (CHO) cell.
55. A vector comprising a polynucleotide of any one of clauses 50-54.
56. An isolated host cell comprising the vector of clause 55.
57. A host cell comprising a polynucleotide of any one of clauses 50-54.
58. An isolated host cell that expresses the antibody of any one of clauses 1-49.
59. The host cell of clause 56, wherein the host cell is selected from a Chinese hamster ovary (CHO) cell, a myeloma cell (e.g., Y0, NS0, Sp2/0), a monkey kidney cell (COS-7), a human embryonic kidney line (293), a baby hamster kidney cell (BHK), a mouse Sertoli cell (e.g., TM4), an African green monkey kidney cell (VERO-76), a human cervical carcinoma cell (HELA), a canine kidney cell, a human lung cell (W138), a human liver cell (Hep G2), a mouse mammary tumor cell, a TR1 cell, an Medical Research Council 5 (MRC 5) cell, and a Foreskin 4 (FS4) cell.
60. A method of producing an antibody comprising culturing the host cell of any one of clauses 56-59 so that an antibody is produced.
61. A hybridoma that produces an antibody of any one of clauses 1-49.
62. A pharmaceutical composition comprising an antibody of any one of clauses 1-49 and a pharmaceutically acceptable carrier.
63. The pharmaceutical composition of clause 62, wherein the composition further comprises a therapeutic agent for treatment of an IL-36-mediated disease or condition; optionally, wherein the therapeutic agent is a chemotherapeutic agent.
64. A method of treating an IL-36-mediated disease in a subject, comprising administering to the subject a therapeutically effective amount of an antibody of any one of clauses 1-49, or a therapeutically effective amount of a pharmaceutical composition of clause 62.
65. A method of treating a disease mediated by IL-36α, IL-36β, and/or IL-36γ stimulated signaling in a subject, the method comprising administering to the subject a therapeutically effective amount of an antibody of any one of clauses 1-49, or a therapeutically effective amount of a pharmaceutical composition of clause 62.
66. The method of any one of clauses 64-65, wherein the disease is selected from: acne due to epidermal growth factor receptor inhibitors, acne and suppurative hidradenitis (PASH), acute generalized exanthematous pustulosis (AGEP), amicrobial pustulosis of the folds, amicrobial pustulosis of the scalp/leg, amicrobial subcorneal pustulosis, aseptic abscess syndrome, Behçet's disease, bowel bypass syndrome, chronic obstructive pulmonary disease (COPD), childhood pustular dermatosis, Crohn's disease, deficiency of the interleukin-1 receptor antagonist (DIRA), deficiency of interleukin-36 receptor antagonist (DITRA), eczema, generalized pustular psoriasis (GPP), erythema elevatum diutinum, hidradenitis suppurativa, IgA pemphigus, inflammatory bowel disease (IBD), neutrophilic panniculitis, palmoplantar pustular psoriasis (PPP), psoriasis, psoriatic arthritis, pustular psoriasis (DIRA, DITRA), pyoderma gangrenosum, pyogenic arthritis pyoderma gangrenosum and acne (PAPA), pyogenic arthritis pyoderma gangrenosum acne and suppurative hidradenitis (PAPASH), rheumatoid neutrophilic dermatosis, synovitis acne pustulosis hyperostosis and osteitis (SAPHO), TNF-induced psoriasis form skin lesions in Crohn's patients, Sjogren's syndrome, Sweet's syndrome, systemic lupus erythematosus (SLE), ulcerative colitis, and uveitis.
67. The method of clause 66, wherein the disease is selected from: generalized pustular psoriasis (GPP), palmoplantar pustular psoriasis (PPP), and psoriasis.
68. A method of treating psoriasis in a subject, the method comprising administering to the subject a therapeutically effective amount of an antibody of any one of clauses 1-49, or a therapeutically effective amount of a pharmaceutical composition of clause 62.
69. A method of treating cancer in a subject, the method comprising administering to the subject a therapeutically effective amount of an antibody of any one of clauses 1-49, or a therapeutically effective amount of a pharmaceutical composition of clause 62; optionally, wherein the cancer is selected from breast cancer, colorectal cancer, non-small cell lung cancer, pancreatic cancer.

[0426] While the foregoing disclosure of the present invention has been described in some detail by way of example and illustration for purposes of clarity and understanding, this disclosure including the examples, descriptions, and embodiments described herein are for illustrative purposes, are intended to be exemplary, and should not be construed as limiting the present disclosure. It will be clear to one skilled in the art that various modifications or changes to the examples, descriptions, and embodiments described herein can be made and are to be included within the spirit and purview of this disclosure and the appended claims. Further, one of skill in the art will recognize a number of equivalent methods and procedure to those described herein. All such equivalents are to be understood to be within the scope of the present disclosure and are covered by the appended claims.

[0427] Additional embodiments of the invention are set forth in the following claims.

[0428] The disclosures of all publications, patent applications, patents, or other documents mentioned herein are expressly incorporated by reference in their entirety for all purposes to the same extent as if each such individual publication, patent, patent application or other document were individually specifically indicated to be incorporated by reference herein in its entirety for all purposes and were set forth in its entirety herein. In case of conflict, the present specification, including specified terms, will control.

### BIBLIOGRAPHY

[0429] Towne et al., (2011) “Interleukin-36 (IL-36) ligands require processing for full agonist (IL-36α, IL-36β, and IL-36γ) or antagonist (IL-36Ra) activity.” J. Biol. Chem. 284: 42594-42602
[0430] Foote et al., (1992) “Antibody framework residues affecting the conformation of the hypervariable loops” J. Mol. Biol. 224: 487-499
[0431] Hotzel et al., (2012) “A strategy for risk mitigation of antibodies with fast clearance” mAbs 4(6): 753-760
[0432] Brenner et al., (1992) “Encoded combinatorial chemistry” Proc. Natl. Acad. Sci. USA 89(12): 5381-5383
[0433] Kunkel et al., (1987) “Rapid and efficient site-specific mutagenesis without phenotypic selection” Methods Enzymol. 154: 367-382
[0434] Masella et al., (2012) “PANDAseq: paired-end assembler for illumine sequences” BMC Bioinformatics 13:31
[0435] Koenig et al., (2015) “Mutational landscape of antibody variable domains reveals a switch modulating the interdomain conformational dynamics and antigen binding” J. Biol. Chem. 290(36): 21773-21786
[0436] John B. B. Ridgway et al., (1996) “‘Knobs-into-holes’ engineering of antibody CH3 domains for heavy chain heterodimerization” Protein Engineering vol. 9 no. 7 pp. 617-621

The application's sequence listing, which the Patent Office published only in electronic form, follows.

SEQUENCE LISTING (751 sequences)

SEQ ID NO: 1 - protein, 153 aa, artificial
  Synthetic polypeptide
KIDTPQQGSIQDINHRVWVLQDQTLIAVPRKDRMSPVTIALISCRHVETLEKDRGNPIYLGLNGLNLCLMCAKVGDQPTLQLKEKDIMDLYNQPEPVKSFLFYHSQSGRNSTFESVAFPGWFIAVSSEGGCPLILTQELGKANTTDFGLTMLF

SEQ ID NO: 2 - protein, 153 aa, artificial
  Synthetic polypeptide
REAAPKSYAIRDSRQMVWVLSGNSLIAAPLSRSIKPVTLHLIACRDTEFSDKEKGNMVYLGIKGKDLCLFCAEIQGKPTLQLKEKNIMDLYVEKKAQKPFLFFHNKEGSTSVFQSVSYPGWFIATSTTSGQPIFLTKERGITNNTNFYLDSVE

SEQ ID NO: 3 - protein, 152 aa, artificial
  Synthetic polypeptide
SMCKPITGTINDLNQQVWTLQGQNLVAVPRSDSVTPVTVAVITCKYPEALEQGRGDPIYLGIQNPEMCLYCEKVGEQPTLQLKEQKIMDLYGQPEPVKPFLFYRAKTGRTSTLESVAFPDWFIASSKRDQPIILTSELGKSYNTAFELNIND

SEQ ID NO: 4 - protein, 154 aa, artificial
  Synthetic polypeptide
VLSGALCFRMKDSALKVLYLHNNQLLAGGLHAGKVIKGEEISVVPNRWLDASLSPVILGVQGGSQCLSCGVGQEPTLTLEPVNIMELYLGAKESKSFTFYRRDMGLTSSFESAAYPGWFLCTVPEADQPVRLTQLPENGGWNAPITDFYFQQCD

SEQ ID NO: 5 - protein, 153 aa, artificial
  Synthetic polypeptide
KSEMPQPVSIQDINHRVWVLQDQILIAVPRKDRVSPVTISLISCRHVETLEKDRGNPIYLGLNGLNLCLMCAKAGDQPTLQLKEKDIMDLYNQPEPVKSFLFYHSQSGRNSTFESVAFPGWFIAVSSEGGCPLILTQELGKANTTDFGLTMLF

SEQ ID NO: 6 - protein, 153 aa, artificial
  Synthetic polypeptide
WQAAPKSYAIRDSRQMVWVLSGNSLIAAPLSNRVKPVTLHLITCRDTEFSDKKKGNLVYLGIRGKDLCLFCEEIQGKPTLQLKEKNIMDLYMEKKAQKPFLFFHNKEGSSSVFQSVSYPGWFIATSSTSGQPIFLTQERGITNNTNFYLDSVE

SEQ ID NO: 7 - protein, 151 aa, artificial
  Synthetic polypeptide
SMRTPITGTINDLNQQVWTLQGQILVAVPRSDSVTPVTVAVITCKYPEALDQSRGDPIYLGIRNPEMCLCCEEVGGQPTLQLKEQKIMDLYGQPEPVKPFLFYRVKTGRTSTLESVAFPNWFIASSTRDQPIILTSELGKSYNTAFELNIK

SEQ ID NO: 8 - protein, 111 aa, artificial
  Synthetic polypeptide
MHHHHHHHHHHHHMSDSEVNQEAKPEVKPEVKPETHINLKVSDGSSEIFFKIKKTTPLRRLMEAFAKRQGKEMDSLRFLYDGIRIQADQTPEDLDMEDNDIIEAHREQIGG

SEQ ID NO: 9 - protein, 20 aa, artificial
  Synthetic polypeptide
MHHHHHHHHHHHHENLYFQS

SEQ ID NO: 10 - protein, 20 aa, artificial
  Synthetic polypeptide
GGGGSGLNDIFEAQKIEWHE

SEQ ID NO: 11 - protein, 19 aa, artificial
  Synthetic polypeptide
MGWSCIILFLVATATGVHS

SEQ ID NO: 12 - protein, 257 aa, artificial
  Synthetic polypeptide
SGGGGSENLYFQGGGGSEPKSCDKTHTCPPCPAPELLGGPSVFLFPPKPKDTLMISRTPEVTCVVVDVSHEDPEVKFNWYVDGVEVHNAKTKPREEQYNSTYRVVSVLTVLHQDWLNGKEYKCKVSNKALPAPIEKTISKAKGQPREPQVYTLPPSRDELTKNQVSLTCLVKGFYPSDIAVEWESNGQPENNYKTTPPVLDSDGSFFLYSKLTVDKSRWQQGNVFSCSVMHEALHNHYTQKSLSLSPGKDYKDDDDK

SEQ ID NO: 13 - protein, 111 aa, artificial
  Synthetic polypeptide
QSVLTQPPSVSGAPGQRVTISCTGSSSNIGAHYDVHWYQQLPGTAPKLLIYSNNNRPSGVPDRFSGSKSGTSASLAITGLQAEDEADYYCQSYDYSLRGYVFGGGTKLTVL

SEQ ID NO: 14 - protein, 14 aa, artificial
  Synthetic polypeptide
TGSSSNIGAHYDVH

SEQ ID NO: 15 - protein, 7 aa, artificial
  Synthetic polypeptide
SNNNRPS

SEQ ID NO: 16 - protein, 11 aa, artificial
  Synthetic polypeptide
QSYDYSLRGYV

SEQ ID NO: 17 - protein, 111 aa, artificial
  Synthetic polypeptide
QSVLTQPPSVSGAPGQRVTISCTGSSSNIGAHYDVHWYQQLPGTAPKLLIYGNDNRPSGVPDRFSGSKSGTSASLAITGLQAEDEADYYCQSYDYSLSGYVFGGGTKLTVL

SEQ ID NO: 18 - protein, 14 aa, artificial
  Synthetic polypeptide
TGSSSNIGAHYDVH

SEQ ID NO: 19 - protein, 7 aa, artificial
  Synthetic polypeptide
GNDNRPS

SEQ ID NO: 20 - protein, 11 aa, artificial
  Synthetic polypeptide
QSYDYSLSGYV

SEQ ID NO: 21 - protein, 111 aa, artificial
  Synthetic polypeptide
QSVLTQPPSVSGAPGQRVTISCTGSSSNIGAGYDVHWYQQLPGTAPKLLIYGNTNRPSGVPDRFSGSKSGTSASLAITGLQAEDEADYYCQSYDYSLRGYVFGGGTKLTVL

SEQ ID NO: 22 - protein, 14 aa, artificial
  Synthetic polypeptide
TGSSSNIGAGYDVH

SEQ ID NO: 23 - protein, 7 aa, artificial
  Synthetic polypeptide
GNTNRPS

SEQ ID NO: 24 - protein, 11 aa, artificial
  Synthetic polypeptide
QSYDYSLRGYV

SEQ ID NO: 25 - protein, 111 aa, artificial
  Synthetic polypeptide
QSVLTQPPSVSGAPGQRVTISCTGSSSNIGAGYDVHWYQQLPGTAPKLLIYGNRNRPSGVPDRFSGSKSGTSASLAITGLQAEDEADYYCQSYDYSLRVYVFGGGTKLTVL

SEQ ID NO: 26 - protein, 14 aa, artificial
  Synthetic polypeptide
TGSSSNIGAGYDVH

SEQ ID NO: 27 - protein, 7 aa, artificial
  Synthetic polypeptide
GNRNRPS

SEQ ID NO: 28 - protein, 11 aa, artificial
  Synthetic polypeptide
QSYDYSLRVYV

SEQ ID NO: 29 - protein, 111 aa, artificial
  Synthetic polypeptide
QSVLTQPPSVSGAPGQRVTISCTGSSSNIGAHYDVHWYQQLPGTAPKLLIYGNDNRPSGVPDRFSGSKSGTSASLAITGLQAEDEADYYCQSYDYSLKAYVFGGGTKLTVL

SEQ ID NO: 30 - protein, 14 aa, artificial
  Synthetic polypeptide
TGSSSNIGAGYDVH

SEQ ID NO: 31 - protein, 7 aa, artificial
  Synthetic polypeptide
GNDNRPS

SEQ ID NO: 32 - protein, 11 aa, artificial
  Synthetic polypeptide
QSYDYSLKAYV

SEQ ID NO: 33 - protein, 111 aa, artificial
  Synthetic polypeptide
QSVLTQPPSVSGAPGQRVTISCTGSSSNIGAGYDVHWYQQLPGTAPKLLIYGNTNRPSGVPDRFSGSKSGTSASLAITGLQAEDEADYYCQSYDISLSGWVFGGGTKLTVL

SEQ ID NO: 34 - protein, 14 aa, artificial
  Synthetic polypeptide
TGSSSNIGAGYDVH

SEQ ID NO: 35 - protein, 7 aa, artificial
  Synthetic polypeptide
GNTNRPS

SEQ ID NO: 36 - protein, 11 aa, artificial
  Synthetic polypeptide
QSYDISLSGWV

SEQ ID NO: 37 - protein, 108 aa, artificial
  Synthetic polypeptide
EIVLTQSPGTLSLSPGERATLSCRASQSVSSNYLAWYQQKPGQAPKLLIYSASSLQSGVPSRFSGSGSGTDFTLTISSLQPEDFATYYCQQTYSYPPTFGQGTKVEIK

SEQ ID NO: 38 - protein, 12 aa, artificial
  Synthetic polypeptide
RASQSVSSNYLA

SEQ ID NO: 39 - protein, 7 aa, artificial
  Synthetic polypeptide
SASSLQS

SEQ ID NO: 40 - protein, 9 aa, artificial
  Synthetic polypeptide
QQTYSYPPT

SEQ ID NO: 41 - protein, 107 aa, artificial
  Synthetic polypeptide
DIQMTQSPSSLSASVGDRVTITCRASQTIYKYLNWYQQKPGKAPKLLIYAASSLQSGVPSRFSGSGSGTDFTLTISSLQPEDFATYYCQQYSSIPYTFGQGTKVEIK

SEQ ID NO: 42 - protein, 11 aa, artificial
  Synthetic polypeptide
RASQTIYKYLN

SEQ ID NO: 43 - protein, 7 aa, artificial
  Synthetic polypeptide
AASSLQS

SEQ ID NO: 44 - protein, 9 aa, artificial
  Synthetic polypeptide
QQYSSIPYT

SEQ ID NO: 45 - protein, 120 aa, artificial
  Synthetic polypeptide
QVQLVESGGGVVQPGRSLRLSCAASGFSFSAYAMHWVRQAPGKGLEWVAVISYDGTNEYYADSVKGRFTISRDNSKNTLYLQMNSLRAEDTAVYYCARGIRIFTSYFDSWGQGTLVTVSS

SEQ ID NO: 46 - protein, 7 aa, artificial
  Synthetic polypeptide
SAYAMHW

SEQ ID NO: 47 - protein, 13 aa, artificial
  Synthetic polypeptide
VISYDGTNEYYAD

SEQ ID NO: 48 - protein, 13 aa, artificial
  Synthetic polypeptide
ARGIRIFTSYFDS

SEQ ID NO: 49 - protein, 123 aa, artificial
  Synthetic polypeptide
QLQLQESGPGLVKPSETLSLTCTVSGGSISTSSYYWGWIRQPPGKGLEWIGSIYYTGNTYYNPSLKSRVTISVDTSKNQFSLKLSSVTAADTAVYYCARVRYGVGVPRYFDPWGQGTLVTVSS

SEQ ID NO: 50 - protein, 7 aa, artificial
  Synthetic polypeptide
STSSYYW

SEQ ID NO: 51 - protein, 12 aa, artificial
  Synthetic polypeptide
SIYYTGNTYYNP

SEQ ID NO: 52 - protein, 15 aa, artificial
  Synthetic polypeptide
ARVRYGVGVPRYFDP

SEQ ID NO: 53 - protein, 123 aa, artificial
  Synthetic polypeptide
QLQLQESGPGLVKPSETLSLTCTVSGGSISSTSYYWGWIRQPPGKGLEWIGSIHYSGNTYYNPSLKSRVTISVDTSKNQFSLKLSSVTAADTAVYYCARVHYGGYIPRRFDHWGQGTLVTVSS

SEQ ID NO: 54 - protein, 7 aa, artificial
  Synthetic polypeptide
SSTSYYW

SEQ ID NO: 55 - protein, 12 aa, artificial
  Synthetic polypeptide
SIHYSGNTYYNP

SEQ ID NO: 56 - protein, 15 aa, artificial
  Synthetic polypeptide
ARVHYGGYIPRRFDH

SEQ ID NO: 57 - protein, 121 aa, artificial
  Synthetic polypeptide
QLQLQESGPGLVKPSETLSLTCTVSGGSIGSRSYYWGWIRQPPGKGLEWIGSIHYSGTTYYNPSLKSRVTISVDTSKNQFSLKLSSVTAADTAVYYCARVAPSYPRVFDYWGQGTLVTVSS

SEQ ID NO: 58 - protein, 7 aa, artificial
  Synthetic polypeptide
GSRSYYW

SEQ ID NO: 59 - protein, 12 aa, artificial
  Synthetic polypeptide
SIHYSGTTYYNP

SEQ ID NO: 60 - protein, 13 aa, artificial
  Synthetic polypeptide
ARVAPSYPRVFDY

SEQ ID NO: 61 - protein, 122 aa, artificial
  Synthetic polypeptide
EVQLLESGGGLVQPGGSLRLSCAASGFTFSTYAMSWVRQAPGKGLEWVSGISGGSGYTYYADSVKGRFTISRDNSKNTLYLQMNSLRAEDTAVYYCARVVTYRDPPASFDYWGQGTLVTVSS

SEQ ID NO: 62 - protein, 6 aa, artificial
  Synthetic polypeptide
STYAMS

SEQ ID NO: 63 - protein, 13 aa, artificial
  Synthetic polypeptide
GISGGSGYTYYAD

SEQ ID NO: 64 - protein, 15 aa, artificial
  Synthetic polypeptide
ARVVTYRDPPASFDY

SEQ ID NO: 65 - protein, 122 aa, artificial
  Synthetic polypeptide
QLQLQESGPGLVKPSETLSLTCTVSGGSITSSNYYWGWIRQPPGKGLEWIGSIDYTGSTYYNPSLKSRVTISVDTSKNQFSLKLSSVTAADTAVYYCARGKYYETYLGFDVWGQGTLVTVSS

SEQ ID NO: 66 - protein, 7 aa, artificial
  Synthetic polypeptide
TSSNYYW

SEQ ID NO: 67 - protein, 12 aa, artificial
  Synthetic polypeptide
SIDYTGSTYYNP

SEQ ID NO: 68 - protein, 14 aa, artificial
  Synthetic polypeptide
ARGKYYETYLGFDV

SEQ ID NO: 69 - protein, 125 aa, artificial
  Synthetic polypeptide
QVQLVESGGGVVQPGRSLRLSCAASGFTFSSYGMHWVRQAPGKGLEWVAVISYGGSERYYADSVKGRFTISRDNSKNTLYLQMNSLRAEDTAVYYCAREPWYSSRGWTGYGFDVWGQGTLVTVSS

SEQ ID NO: 70 - protein, 6 aa, artificial
  Synthetic polypeptide
SSYGMH

SEQ ID NO: 71 - protein, 13 aa, artificial
  Synthetic polypeptide
VISYGGSERYYAD

SEQ ID NO: 72 - protein, 18 aa, artificial
  Synthetic polypeptide
AREPWYSSRGWTGYGFDV

SEQ ID NO: 73 - protein, 120 aa, artificial
  Synthetic polypeptide
QVQLVQSGAEVKKPGSSVKVSCKASGGTFSNYAISWVRQAPGQGLEWMGGILPILGTVDYAQKFQGRVTITADESTSTAYMELSSLRSEDTAVYYCAREPWYRLGAFDVWGQGTLVTVSS

SEQ ID NO: 74 - protein, 6 aa, artificial
  Synthetic polypeptide
SNYAIS

SEQ ID NO: 75 - protein, 13 aa, artificial
  Synthetic polypeptide
GILPILGTVDYAQ

SEQ ID NO: 76 - protein, 13 aa, artificial
  Synthetic polypeptide
AREPWYRLGAFDV

SEQ ID NO: 77 - protein, 111 aa, artificial
  Synthetic polypeptide
ESVLTQPPSVSGAPGQRVTISCTGSSSNIGAHYDVHWYQQLPGTAPKLLIYGNDNRPSGVPDRFSGSKSGTSASLAITGLQAEDEADYYCQSYDYSLSGYVFGGGTKLTVL

SEQ ID NO: 78 - protein, 111 aa, artificial
  Synthetic polypeptide
ESVLTQPPSVSGAPGQRVTISCTGSSSNIGAGYDVHWYQQLPGTAPKLLIYGNTNRPSGVPDRFSGSKSGTSASLAITGLQAEDEADYYCQSYDISLSGWVFGGGTKLTVL

SEQ ID NO: 79 - protein, 123 aa, artificial
  Synthetic polypeptide
ELQLQESGPGLVKPSETLSLTCTVSGGSISTSSYYWGWIRQPPGKGLEWIGSIYYTGNTYYNPSLKSRVTISVDTSKNQFSLKLSSVTAADTAVYYCARVRYGVGVPRYFDPWGQGTLVTVSS

SEQ ID NO: 80 - protein, 122 aa, artificial
  Synthetic polypeptide
ELQLQESGPGLVKPSETLSLTCTVSGGSITSSNYYWGWIRQPPGKGLEWIGSIDYTGSTYYNPSLKSRVTISVDTSKNQFSLKLSSVTAADTAVYYCARGKYYETYLGFDVWGQGTLVTVSS

SEQ ID NO: 81 - protein, 122 aa, artificial
  Synthetic polypeptide
ELQLQESGPGLVKPSETLSLTCTVSGGSITSTNYYWGWIRQPPGKGLEWIGNIDYTGSTYYNASLKSRVTISVDTSKNQFSLKLSSVTAADTAVYYCATGKYYETYLGFDVWGQGTLVTVSS

SEQ ID NO: 82 - protein, 7 aa, artificial
  Synthetic polypeptide
TSTNYYW

SEQ ID NO: 83 - protein, 12 aa, artificial
  Synthetic polypeptide
NIDYTGSTYYNA

SEQ ID NO: 84 - protein, 14 aa, artificial
  Synthetic polypeptide
ATGKYYETYLGFDV

SEQ ID NO: 85 - protein, 122 aa, artificial
  Synthetic polypeptide
ELQLQESGPGLVKPSETLSLTCTVSGGSITSSNAYWGWIRQPPGKGLEWIGSIDYTGSTAYNPSLKSRVTISVDTSKNQFSLKLSSVTAADTAVYYCAHGKYYETYLGFDVWGQGTLVTVSS

SEQ ID NO: 86 - protein, 7 aa, artificial
  Synthetic polypeptide
TSSNAYW

SEQ ID NO: 87 - protein, 12 aa, artificial
  Synthetic polypeptide
SIDYTGSTAYNP

SEQ ID NO: 88 - protein, 14 aa, artificial
  Synthetic polypeptide
AHGKYYETYLGFDV

SEQ ID NO: 89 - protein, 122 aa, artificial
  Synthetic polypeptide
ELQLQESGPGLVKPSETLSLTCTVSGGSITASNYYWGWIRQPPGKGLEWIGSIDYTGSTYYNTSLKSRVTISVDTSKNQFSLKLSSVTAADTAVYYCATGKYYETYLGFDVWGQGTLVTVSS

SEQ ID NO: 90 - protein, 7 aa, artificial
  Synthetic polypeptide
TASNYYW

SEQ ID NO: 91 - protein, 12 aa, artificial
  Synthetic polypeptide
SIDYTGSTYYNT

SEQ ID NO: 92 - protein, 14 aa, artificial
  Synthetic polypeptide
ATGKYYETYLGFDV

SEQ ID NO: 93 - protein, 122 aa, artificial
  Synthetic polypeptide
ELQLQESGPGLVKPSETLSLTCTVSGGSITASNYYWGWIRQPPGKGLEWIGSIDYTGSTYYNPSLKSRVTISVDTSKNQFSLKLSSVTAADTAVYYCATGKYYETYLGFDVWGQGTLVTVSS

SEQ ID NO: 94 - protein, 7 aa, artificial
  Synthetic polypeptide
TASNYYW

SEQ ID NO: 95 - protein, 12 aa, artificial
  Synthetic polypeptide
SIDYTGSTYYNP

SEQ ID NO: 96 - protein, 14 aa, artificial
  Synthetic polypeptide
ATGKYYETYLGFDV

SEQ ID NO: 97 - protein, 122 aa, artificial
  Synthetic polypeptide
ELQLQESGPGLVKPSETLSLTCTVSGGSITASNYYWGWIRQPPGKGLEWIGSIDYTGSTYYEPSLKSRVTISVDTSKNQFSLKLSSVTAADTAVYYCATGSYYETYLGFDVWGQGTLVTVSS

SEQ ID NO: 98 - protein, 7 aa, artificial
  Synthetic polypeptide
TASNYYW

SEQ ID NO: 99 - protein, 12 aa, artificial
  Synthetic polypeptide
SIDYTGSTYYEP

SEQ ID NO: 100 - protein, 14 aa, artificial
  Synthetic polypeptide
ATGSYYETYLGFDV

SEQ ID NO: 101 - protein, 122 aa, artificial
  Synthetic polypeptide
ELQLQESGPGLVKPSETLSLTCTVSGGSITASNYYWGWIRQPPGKGLEWIGSIDYTGSTYYEPSLKSRVTISVDTSKNQFSLKLSSVTAADTAVYYCATGNYYETYLGFDVWGQGTLVTVSS

SEQ ID NO: 102 - protein, 7 aa, artificial
  Synthetic polypeptide
TASNYYW

SEQ ID NO: 103 - protein, 12 aa, artificial
  Synthetic polypeptide
SIDYTGSTYYEP

SEQ ID NO: 104 - protein, 14 aa, artificial
  Synthetic polypeptide
ATGNYYETYLGFDV

SEQ ID NO: 105 - protein, 122 aa, artificial
  Synthetic polypeptide
ELQLQESGPGLVKPSETLSLTCTVSGGSITASNTYWGWIRQPPGKGLEWIGSIDYTGSTYYNPSLKSRVTISVDTSKNQFSLKLSSVTAADTAVYYCATGKYYETYLGFDVWGQGTLVTVSS

SEQ ID NO: 106 - protein, 7 aa, artificial
  Synthetic polypeptide
TASNTYW

SEQ ID NO: 107 - protein, 12 aa, artificial
  Synthetic polypeptide
SIDYTGSTYYNP

SEQ ID NO: 108 - protein, 14 aa, artificial
  Synthetic polypeptide
ATGKYYETYLGFDV

SEQ ID NO: 109 - protein, 122 aa, artificial
  Synthetic polypeptide
ELQLQESGPGLVKPSETLSLTCTVSGGSITASNYYWGWIRQPPGKGLEWIGSIDYTGSTYYNPSLKSRVTISVDTSKNQFSLKLSSVTAADTAVYYCASGKYYETYLGFDVWGQGTLVTVSS

SEQ ID NO: 110 - protein, 7 aa, artificial
  Synthetic polypeptide
TASNYYW

SEQ ID NO: 111 - protein, 12 aa, artificial
  Synthetic polypeptide
SIDYTGSTYYNP

SEQ ID NO: 112 - protein, 14 aa, artificial
  Synthetic polypeptide
ASGKYYETYLGFDV

SEQ ID NO: 113 - protein, 122 aa, artificial
  Synthetic polypeptide
ELQLQESGPGLVKPSETLSLTCTVSGGSITSSNYYWGWIRQPPGKGLEWIGSIDYTGSTYYNPSLKSRVTISVDTSKNQFSLKLSSVTAADTAVYYCATGKYYETYLGFDVWGQGTLVTVSS

SEQ ID NO: 114 - protein, 7 aa, artificial
  Synthetic polypeptide
TSSNYYW

SEQ ID NO: 115 - protein, 12 aa, artificial
  Synthetic polypeptide
SIDYTGSTYYNP

SEQ ID NO: 116 - protein, 14 aa, artificial
  Synthetic polypeptide
ATGKYYETYLGFDV

SEQ ID NO: 117 - protein, 122 aa, artificial
  Synthetic polypeptide
ELQLQESGPGLVKPSETLSLTCTVSGGSITSSNYYWGWIRQPPGKGLEWIGSIDYTGSTYYQPSLKSRVTISVDTSKNQFSLKLSSVTAADTAVYYCARGNYYETYLGFDVWGQGTLVTVSS

SEQ ID NO: 118 - protein, 7 aa, artificial
  Synthetic polypeptide
TSSNYYW

SEQ ID NO: 119 - protein, 12 aa, artificial
  Synthetic polypeptide
SIDYTGSTYYQP

SEQ ID NO: 120 - protein, 14 aa, artificial
  Synthetic polypeptide
ARGNYYETYLGFDV

SEQ ID NO: 121 - protein, 123 aa, artificial
  Synthetic polypeptide
ELQLQESGPGLVKPSETLSLTCTVSGGSISDSSYYWGWIRQPPGKGLEWIGSIYYTGNTYYNSSLKSRVTISVDTSKNQFSLKLSSVTAADTAVYYCARVRYGVGVPRYFDPWGQGTLVTVSS

SEQ ID NO: 122 - protein, 7 aa, artificial
  Synthetic polypeptide
SDSSYYW

SEQ ID NO: 123 - protein, 12 aa, artificial
  Synthetic polypeptide
SIYYTGNTYYNS

SEQ ID NO: 124 - protein, 15 aa, artificial
  Synthetic polypeptide
ARVRYGVGVPRYFDP

SEQ ID NO: 125 - protein, 123 aa, artificial
  Synthetic polypeptide
ELQLQESGPGLVKPSETLSLTCTVSGGSISESSYYWGWIRQPPGKGLEWIGSIYYTGNTYYNPSLKSRVTISVDTSKNQFSLKLSSVTAADTAVYYCAGVRYGVGVPRYFDPWGQGTLVTVSS

SEQ ID NO: 126 - protein, 7 aa, artificial
  Synthetic polypeptide
SESSYYW

SEQ ID NO: 127 - protein, 12 aa, artificial
  Synthetic polypeptide
SIYYTGNTYYNP

SEQ ID NO: 128 - protein, 15 aa, artificial
  Synthetic polypeptide
AGVRYGVGVPRYFDP

SEQ ID NO: 129 - protein, 123 aa, artificial
  Synthetic polypeptide
ELQLQESGPGLVKPSETLSLTCTVSGGSISTSSDYWGWIRQPPGKGLEWIGSIYYTGNTYYLPSLKSRVTISVDTSKNQFSLKLSSVTAADTAVYYCSRVRYGVGVPRYFDPWGQGTLVTVSS

SEQ ID NO: 130 - protein, 7 aa, artificial
  Synthetic polypeptide
STSSDYW

SEQ ID NO: 131 - protein, 12 aa, artificial
  Synthetic polypeptide
SIYYTGNTYYLP

SEQ ID NO: 132 - protein, 15 aa, artificial
  Synthetic polypeptide
SRVRYGVGVPRYFDP

SEQ ID NO: 133 - protein, 123 aa, artificial
  Synthetic polypeptide
ELQLQESGPGLVKPSETLSLTCTVSGGSISNSSYYWGWIRQPPGKGLEWIGSIYYTGNTYYLPSLKSRVTISVDTSKNQFSLKLSSVTAADTAVYYCARVRYGVGVPRYFDPWGQGTLVTVSS

SEQ ID NO: 134 - protein, 7 aa, artificial
  Synthetic polypeptide
SNSSYYW

SEQ ID NO: 135 - protein, 12 aa, artificial
  Synthetic polypeptide
SIYYTGNTYYLP

SEQ ID NO: 136 - protein, 15 aa, artificial
  Synthetic polypeptide
ARVRYGVGVPRYFDP

SEQ ID NO: 137 - protein, 123 aa, artificial
  Synthetic polypeptide
ELQLQESGPGLVKPSETLSLTCTVSGGSISESSYYWGWIRQPPGKGLEWIGSIYYTGNTYYLPSLKSRVTISVDTSKNQFSLKLSSVTAADTAVYYCARVRYGVGVPRYFDPWGQGTLVTVSS

SEQ ID NO: 138 - protein, 7 aa, artificial
  Synthetic polypeptide
SESSYYW

SEQ ID NO: 139 - protein, 12 aa, artificial
  Synthetic polypeptide
SIYYTGNTYYLP

SEQ ID NO: 140 - protein, 15 aa, artificial
  Synthetic polypeptide
ARVRYGVGVPRYFDP

SEQ ID NO: 141 - protein, 123 aa, artificial
  Synthetic polypeptide
ELQLQESGPGLVKPSETLSLTCTVSGGSISTSSYHWGWIRQPPGKGLEWIGSIYYTGNTYYMPSLKSRVTISVDTSKNQFSLKLSSVTAADTAVYYCVRVRYGVGVPRYFDPWGQGTLVTVSS

SEQ ID NO: 142 - protein, 7 aa, artificial
  Synthetic polypeptide
STSSYHW

SEQ ID NO: 143 - protein, 12 aa, artificial
  Synthetic polypeptide
SIYYTGNTYYMP

SEQ ID NO: 144 - protein, 15 aa, artificial
  Synthetic polypeptide
VRVRYGVGVPRYFDP

SEQ ID NO: 145 - protein, 123 aa, artificial
  Synthetic polypeptide
ELQLQESGPGLVKPSETLSLTCTVSGGSISRSSYYWGWIRQPPGKGLEWIGSIYYTGNTYYWPSLKSRVTISVDTSKNQFSLKLSSVTAADTAVYYCTRVRYGVGVPRYFDPWGQGTLVTVSS

SEQ ID NO: 146 - protein, 7 aa, artificial
  Synthetic polypeptide
SRSSYYW

SEQ ID NO: 147 - protein, 12 aa, artificial
  Synthetic polypeptide
SIYYTGNTYYWP

SEQ ID NO: 148 - protein, 15 aa, artificial
  Synthetic polypeptide
TRVRYGVGVPRYFDP

SEQ ID NO: 149 - protein, 123 aa, artificial
  Synthetic polypeptide
ELQLQESGPGLVKPSETLSLTCTVSGGSISDSSYYWGWIRQPPGKGLEWIGSIYYTGETYYAPSLKSRVTISVDTSKNQFSLKLSSVTAADTAVYYCARLRYGVGVPRYFDPWGQGTLVTVSS

SEQ ID NO: 150 - protein, 7 aa, artificial
  Synthetic polypeptide
SDSSYYW

SEQ ID NO: 151 - protein, 12 aa, artificial
  Synthetic polypeptide
SIYYTGETYYAP

SEQ ID NO: 152 - protein, 15 aa, artificial
  Synthetic polypeptide
ARLRYGVGVPRYFDP

SEQ ID NO: 153 - protein, 123 aa, artificial
  Synthetic polypeptide
ELQLQESGPGLVKPSETLSLTCTVSGGSISDSSYYWGWIRQPPGKGLEWIGSIYYTGETYYAPSLKSRVTISVDTSKNQFSLKLSSVTAADTAVYYCARVKYGVGVPRYFDPWGQGTLVTVSS

SEQ ID NO: 154 - protein, 7 aa, artificial
  Synthetic polypeptide
SDSSYYW

SEQ ID NO: 155 - protein, 12 aa, artificial
  Synthetic polypeptide
SIYYTGETYYAP

SEQ ID NO: 156 - protein, 15 aa, artificial
  Synthetic polypeptide
ARVKYGVGVPRYFDP

SEQ ID NO: 157 - protein, 123 aa, artificial
  Synthetic polypeptide
ELQLQESGPGLVKPSETLSLTCTVSGGSISDSSYYWGWIRQPPGKGLEWIGSIYYTGETYYAPSLKSRVTISVDTSKNQFSLKLSSVTAADTAVYYCARVRYGVGVPRHFDPWGQGTLVTVSS

SEQ ID NO: 158 - protein, 7 aa, artificial
  Synthetic polypeptide
SDSSYYW

SEQ ID NO: 159 - protein, 12 aa, artificial
  Synthetic polypeptide
SIYYTGETYYAP

SEQ ID NO: 160 - protein, 15 aa, artificial
  Synthetic polypeptide
ARVRYGVGVPRHFDP

SEQ ID NO: 161 - protein, 123 aa, artificial
  Synthetic polypeptide
ELQLQESGPGLVKPSETLSLTCTVSGGSISESSYYWGWIRQPPGKGLEWIGSIYYTGETYYAPSLKSRVTISVDTSKNQFSLKLSSVTAADTAVYYCARLRYGVGVPRYFDPWGQGTLVTVSS

SEQ ID NO: 162 - protein, 7 aa, artificial
  Synthetic polypeptide
SESSYYW

SEQ ID NO: 163 - protein, 12 aa, artificial
  Synthetic polypeptide
SIYYTGETYYAP

SEQ ID NO: 164 - protein, 15 aa, artificial
  Synthetic polypeptide
ARLRYGVGVPRYFDP

SEQ ID NO: 165 - protein, 123 aa, artificial
  Synthetic polypeptide
ELQLQESGPGLVKPSETLSLTCTVSGGSISESSYYWGWIRQPPGKGLEWIGSIYYTGETYYAPSLKSRVTISVDTSKNQFSLKLSSVTAADTAVYYCARVKYGVGVPRYFDPWGQGTLVTVSS

SEQ ID NO: 166 - protein, 7 aa, artificial
  Synthetic polypeptide
SESSYYW

SEQ ID NO: 167 - protein, 12 aa, artificial
  Synthetic polypeptide
SIYYTGETYYAP

SEQ ID NO: 168 - protein, 15 aa, artificial
  Synthetic polypeptide
ARVKYGVGVPRYFDP

SEQ ID NO: 169 - protein, 217 aa, artificial
  Synthetic polypeptide
ESVLTQPPSVSGAPGQRVTISCTGSSSNIGAHYDVHWYQQLPGTAPKLLIYGNDNRPSGVPDRFSGSKSGTSASLAITGLQAEDEADYYCQSYDYSLSGYVFGGGTKLTVLGQPKAAPSVTLFPPSSEELQANKATLVCLISDFYPGAVTVAWKADSSPVKAGVETTTPSKQSNNKYAASSYLSLTPEQWKSHKSYSCQVTHEGSTVEKTVAPTECS

SEQ ID NO: 170 - protein, 451 aa, artificial
  Synthetic polypeptide
ELQLQESGPGLVKPSETLSLTCTVSGGSITSSNYYWGWIRQPPGKGLEWIGSIDYTGSTYYNPSLKSRVTISVDTSKNQFSLKLSSVTAADTAVYYCARGKYYETYLGFDVWGQGTLVTVSSASTKGPSVFPLAPSSKSTSGGTAALGCLVKDYFPEPVTVSWNSGALTSGVHTFPAVLQSSGLYSLSSVVTVPSSSLGTQTYICNVNHKPSNTKVDKKVEPKSCDKTHTCPPCPAPELLGGPSVFLFPPKPKDTLMISRTPEVTCVVVDVSHEDPEVKFNWYVDGVEVHNAKTKPREEQYGSTYRVVSVLTVLHQDWLNGKEYKCKVSNKALPAPIEKTISKAKGQPREPQVYTLPPSRDELTKNQVSLTCLVKGFYPSDIAVEWESNGQPENNYKTTPPVLDSDGSFFLYSKLTVDKSRWQQGNVFSCSVMHEALHNHYTQKSLSLSPG

SEQ ID NO: 171 - protein, 451 aa, artificial
  Synthetic polypeptide
ELQLQESGPGLVKPSETLSLTCTVSGGSITSSNYYWGWIRQPPGKGLEWIGSIDYTGSTYYNPSLKSRVTISVDTSKNQFSLKLSSVTAADTAVYYCARGKYYETYLGFDVWGQGTLVTVSSASTKGPSVFPLAPSSKSTSGGTAALGCLVKDYFPEPVTVSWNSGALTSGVHTFPAVLQSSGLYSLSSVVTVPSSSLGTQTYICNVNHKPSNTKVDKKVEPKSCDKTHTCPPCPAPELLGGPSVFLFPPKPKDTLMISRTPEVTCVVVDVSHEDPEVKFNWYVDGVEVHNAKTKPREEQYGSTYRVVSVLTVLHQDWLNGKEYKCKVSNKALPAPIEKTISKAKGQPREPQVYTLPPSRDELTKNQVSLWCLVKGFYPSDIAVEWESNGQPENNYKTTPPVLDSDGSFFLYSKLTVDKSRWQQGNVFSCSVMHEALHNHYTQKSLSLSPG

SEQ ID NO: 172 - protein, 451 aa, artificial
  Synthetic polypeptide
ELQLQESGPGLVKPSETLSLTCTVSGGSITSSNYYWGWIRQPPGKGLEWIGSIDYTGSTYYNPSLKSRVTISVDTSKNQFSLKLSSVTAADTAVYYCARGKYYETYLGFDVWGQGTLVTVSSASTKGPSVFPLAPSSKSTSGGTAALGCLVKDYFPEPVTVSWNSGALTSGVHTFPAVLQSSGLYSLSSVVTVPSSSLGTQTYICNVNHKPSNTKVDKKVEPKSCDKTHTCPPCPAPELLGGPSVFLFPPKPKDTLMISRTPEVTCVVVDVSHEDPEVKFNWYVDGVEVHNAKTKPREEQYGSTYRVVSVLTVLHQDWLNGKEYKCKVSNKALPAPIEKTISKAKGQPREPQVYTLPPSRDELTKNQVSLSCAVKGFYPSDIAVEWESNGQPENNYKTTPPVLDSDGSFFLVSKLTVDKSRWQQGNVFSCSVMHEALHNHYTQKSLSLSPG

SEQ ID NO: 173 - protein, 451 aa, artificial
  Synthetic polypeptide
ELQLQESGPGLVKPSETLSLTCTVSGGSITSTNYYWGWIRQPPGKGLEWIGNIDYTGSTYYNASLKSRVTISVDTSKNQFSLKLSSVTAADTAVYYCATGKYYETYLGFDVWGQGTLVTVSSASTKGPSVFPLAPSSKSTSGGTAALGCLVKDYFPEPVTVSWNSGALTSGVHTFPAVLQSSGLYSLSSVVTVPSSSLGTQTYICNVNHKPSNTKVDKKVEPKSCDKTHTCPPCPAPELLGGPSVFLFPPKPKDTLMISRTPEVTCVVVDVSHEDPEVKFNWYVDGVEVHNAKTKPREEQYGSTYRVVSVLTVLHQDWLNGKEYKCKVSNKALPAPIEKTISKAKGQPREPQVYTLPPSRDELTKNQVSLTCLVKGFYPSDIAVEWESNGQPENNYKTTPPVLDSDGSFFLYSKLTVDKSRWQQGNVFSCSVMHEALHNHYTQKSLSLSPG

SEQ ID NO: 174 - protein, 451 aa, artificial
  Synthetic polypeptide
ELQLQESGPGLVKPSETLSLTCTVSGGSITSTNYYWGWIRQPPGKGLEWIGNIDYTGSTYYNASLKSRVTISVDTSKNQFSLKLSSVTAADTAVYYCATGKYYETYLGFDVWGQGTLVTVSSASTKGPSVFPLAPSSKSTSGGTAALGCLVKDYFPEPVTVSWNSGALTSGVHTFPAVLQSSGLYSLSSVVTVPSSSLGTQTYICNVNHKPSNTKVDKKVEPKSCDKTHTCPPCPAPELLGGPSVFLFPPKPKDTLMISRTPEVTCVVVDVSHEDPEVKFNWYVDGVEVHNAKTKPREEQYGSTYRVVSVLTVLHQDWLNGKEYKCKVSNKALPAPIEKTISKAKGQPREPQVYTLPPSRDELTKNQVSLWCLVKGFYPSDIAVEWESNGQPENNYKTTPPVLDSDGSFFLYSKLTVDKSRWQQGNVFSCSVMHEALHNHYTQKSLSLSPG

SEQ ID NO: 175 - protein, 451 aa, artificial
  Synthetic polypeptide
ELQLQESGPGLVKPSETLSLTCTVSGGSITSTNYYWGWIRQPPGKGLEWIGNIDYTGSTYYNASLKSRVTISVDTSKNQFSLKLSSVTAADTAVYYCATGKYYETYLGFDVWGQGTLVTVSSASTKGPSVFPLAPSSKSTSGGTAALGCLVKDYFPEPVTVSWNSGALTSGVHTFPAVLQSSGLYSLSSVVTVPSSSLGTQTYICNVNHKPSNTKVDKKVEPKSCDKTHTCPPCPAPELLGGPSVFLFPPKPKDTLMISRTPEVTCVVVDVSHEDPEVKFNWYVDGVEVHNAKTKPREEQYGSTYRVVSVLTVLHQDWLNGKEYKCKVSNKALPAPIEKTISKAKGQPREPQVYTLPPSRDELTKNQVSLSCAVKGFYPSDIAVEWESNGQPENNYKTTPPVLDSDGSFFLVSKLTVDKSRWQQGNVFSCSVMHEALHNHYTQKSLSLSPG

SEQ ID NO: 176 - protein, 451 aa, artificial
  Synthetic polypeptide
ELQLQESGPGLVKPSETLSLTCTVSGGSITSSNAYWGWIRQPPGKGLEWIGSIDYTGSTAYNPSLKSRVTISVDTSKNQFSLKLSSVTAADTAVYYCAHGKYYETYLGFDVWGQGTLVTVSSASTKGPSVFPLAPSSKSTSGGTAALGCLVKDYFPEPVTVSWNSGALTSGVHTFPAVLQSSGLYSLSSVVTVPSSSLGTQTYICNVNHKPSNTKVDKKVEPKSCDKTHTCPPCPAPELLGGPSVFLFPPKPKDTLMISRTPEVTCVVVDVSHEDPEVKFNWYVDGVEVHNAKTKPREEQYGSTYRVVSVLTVLHQDWLNGKEYKCKVSNKALPAPIEKTISKAKGQPREPQVYTLPPSRDELTKNQVSLTCLVKGFYPSDIAVEWESNGQPENNYKTTPPVLDSDGSFFLYSKLTVDKSRWQQGNVFSCSVMHEALHNHYTQKSLSLSPG

SEQ ID NO: 177 - protein, 451 aa, artificial
  Synthetic polypeptide
ELQLQESGPGLVKPSETLSLTCTVSGGSITSSNAYWGWIRQPPGKGLEWIGSIDYTGSTAYNPSLKSRVTISVDTSKNQFSLKLSSVTAADTAVYYCAHGKYYETYLGFDVWGQGTLVTVSSASTKGPSVFPLAPSSKSTSGGTAALGCLVKDYFPEPVTVSWNSGALTSGVHTFPAVLQSSGLYSLSSVVTVPSSSLGTQTYICNVNHKPSNTKVDKKVEPKSCDKTHTCPPCPAPELLGGPSVFLFPPKPKDTLMISRTPEVTCVVVDVSHEDPEVKFNWYVDGVEVHNAKTKPREEQYGSTYRVVSVLTVLHQDWLNGKEYKCKVSNKALPAPIEKTISKAKGQPREPQVYTLPPSRDELTKNQVSLWCLVKGFYPSDIAVEWESNGQPENNYKTTPPVLDSDGSFFLYSKLTVDKSRWQQGNVFSCSVMHEALHNHYTQKSLSLSPG

SEQ ID NO: 178 - protein, 451 aa, artificial
  Synthetic polypeptide
ELQLQESGPGLVKPSETLSLTCTVSGGSITSSNAYWGWIRQPPGKGLEWIGSIDYTGSTAYNPSLKSRVTISVDTSKNQFSLKLSSVTAADTAVYYCAHGKYYETYLGFDVWGQGTLVTVSSASTKGPSVFPLAPSSKSTSGGTAALGCLVKDYFPEPVTVSWNSGALTSGVHTFPAVLQSSGLYSLSSVVTVPSSSLGTQTYICNVNHKPSNTKVDKKVEPKSCDKTHTCPPCPAPELLGGPSVFLFPPKPKDTLMISRTPEVTCVVVDVSHEDPEVKFNWYVDGVEVHNAKTKPREEQYGSTYRVVSVLTVLHQDWLNGKEYKCKVSNKALPAPIEKTISKAKGQPREPQVYTLPPSRDELTKNQVSLSCAVKGFYPSDIAVEWESNGQPENNYKTTPPVLDSDGSFFLVSKLTVDKSRWQQGNVFSCSVMHEALHNHYTQKSLSLSPG

SEQ ID NO: 179 - protein, 451 aa, artificial
  Synthetic polypeptide
ELQLQESGPGLVKPSETLSLTCTVSGGSITASNYYWGWIRQPPGKGLEWIGSIDYTGSTYYNTSLKSRVTISVDTSKNQFSLKLSSVTAADTAVYYCATGKYYETYLGFDVWGQGTLVTVSSASTKGPSVFPLAPSSKSTSGGTAALGCLVKDYFPEPVTVSWNSGALTSGVHTFPAVLQSSGLYSLSSVVTVPSSSLGTQTYICNVNHKPSNTKVDKKVEPKSCDKTHTCPPCPAPELLGGPSVFLFPPKPKDTLMISRTPEVTCVVVDVSHEDPEVKFNWYVDGVEVHNAKTKPREEQYGSTYRVVSVLTVLHQDWLNGKEYKCKVSNKALPAPIEKTISKAKGQPREPQVYTLPPSRDELTKNQVSLTCLVKGFYPSDIAVEWESNGQPENNYKTTPPVLDSDGSFFLYSKLTVDKSRWQQGNVFSCSVMHEALHNHYTQKSLSLSPG

SEQ ID NO: 180 - protein, 451 aa, artificial
  Synthetic polypeptide
ELQLQESGPGLVKPSETLSLTCTVSGGSITASNYYWGWIRQPPGKGLEWIGSIDYTGSTYYNTSLKSRVTISVDTSKNQFSLKLSSVTAADTAVYYCATGKYYETYLGFDVWGQGTLVTVSSASTKGPSVFPLAPSSKSTSGGTAALGCLVKDYFPEPVTVSWNSGALTSGVHTFPAVLQSSGLYSLSSVVTVPSSSLGTQTYICNVNHKPSNTKVDKKVEPKSCDKTHTCPPCPAPELLGGPSVFLFPPKPKDTLMISRTPEVTCVVVDVSHEDPEVKFNWYVDGVEVHNAKTKPREEQYGSTYRVVSVLTVLHQDWLNGKEYKCKVSNKALPAPIEKTISKAKGQPREPQVYTLPPSRDELTKNQVSLWCLVKGFYPSDIAVEWESNGQPENNYKTTPPVLDSDGSFFLYSKLTVDKSRWQQGNVFSCSVMHEALHNHYTQKSLSLSPG

SEQ ID NO: 181 - protein, 451 aa, artificial
  Synthetic polypeptide
ELQLQESGPGLVKPSETLSLTCTVSGGSITASNYYWGWIRQPPGKGLEWIGSIDYTGSTYYNTSLKSRVTISVDTSKNQFSLKLSSVTAADTAVYYCATGKYYETYLGFDVWGQGTLVTVSSASTKGPSVFPLAPSSKSTSGGTAALGCLVKDYFPEPVTVSWNSGALTSGVHTFPAVLQSSGLYSLSSVVTVPSSSLGTQTYICNVNHKPSNTKVDKKVEPKSCDKTHTCPPCPAPELLGGPSVFLFPPKPKDTLMISRTPEVTCVVVDVSHEDPEVKFNWYVDGVEVHNAKTKPREEQYGSTYRVVSVLTVLHQDWLNGKEYKCKVSNKALPAPIEKTISKAKGQPREPQVYTLPPSRDELTKNQVSLSCAVKGFYPSDIAVEWESNGQPENNYKTTPPVLDSDGSFFLVSKLTVDKSRWQQGNVFSCSVMHEALHNHYTQKSLSLSPG

SEQ ID NO: 182 - protein, 451 aa, artificial
  Synthetic polypeptide
ELQLQESGPGLVKPSETLSLTCTVSGGSITASNYYWGWIRQPPGKGLEWIGSIDYTGSTYYNPSLKSRVTISVDTSKNQFSLKLSSVTAADTAVYYCATGKYYETYLGFDVWGQGTLVTVSSASTKGPSVFPLAPSSKSTSGGTAALGCLVKDYFPEPVTVSWNSGALTSGVHTFPAVLQSSGLYSLSSVVTVPSSSLGTQTYICNVNHKPSNTKVDKKVEPKSCDKTHTCPPCPAPELLGGPSVFLFPPKPKDTLMISRTPEVTCVVVDVSHEDPEVKFNWYVDGVEVHNAKTKPREEQYGSTYRVVSVLTVLHQDWLNGKEYKCKVSNKALPAPIEKTISKAKGQPREPQVYTLPPSRDELTKNQVSLTCLVKGFYPSDIAVEWESNGQPENNYKTTPPVLDSDGSFFLYSKLTVDKSRWQQGNVFSCSVMHEALHNHYTQKSLSLSPG

SEQ ID NO: 183 - protein, 451 aa, artificial
  Synthetic polypeptide
ELQLQESGPGLVKPSETLSLTCTVSGGSITASNYYWGWIRQPPGKGLEWIGSIDYTGSTYYNPSLKSRVTISVDTSKNQFSLKLSSVTAADTAVYYCATGKYYETYLGFDVWGQGTLVTVSSASTKGPSVFPLAPSSKSTSGGTAALGCLVKDYFPEPVTVSWNSGALTSGVHTFPAVLQSSGLYSLSSVVTVPSSSLGTQTYICNVNHKPSNTKVDKKVEPKSCDKTHTCPPCPAPELLGGPSVFLFPPKPKDTLMISRTPEVTCVVVDVSHEDPEVKFNWYVDGVEVHNAKTKPREEQYGSTYRVVSVLTVLHQDWLNGKEYKCKVSNKALPAPIEKTISKAKGQPREPQVYTLPPSRDELTKNQVSLWCLVKGFYPSDIAVEWESNGQPENNYKTTPPVLDSDGSFFLYSKLTVDKSRWQQGNVFSCSVMHEALHNHYTQKSLSLSPG

SEQ ID NO: 184 - protein, 451 aa, artificial
  Synthetic polypeptide
ELQLQESGPGLVKPSETLSLTCTVSGGSITASNYYWGWIRQPPGKGLEWIGSIDYTGSTYYNPSLKSRVTISVDTSKNQFSLKLSSVTAADTAVYYCATGKYYETYLGFDVWGQGTLVTVSSASTKGPSVFPLAPSSKSTSGGTAALGCLVKDYFPEPVTVSWNSGALTSGVHTFPAVLQSSGLYSLSSVVTVPSSSLGTQTYICNVNHKPSNTKVDKKVEPKSCDKTHTCPPCPAPELLGGPSVFLFPPKPKDTLMISRTPEVTCVVVDVSHEDPEVKFNWYVDGVEVHNAKTKPREEQYGSTYRVVSVLTVLHQDWLNGKEYKCKVSNKALPAPIEKTISKAKGQPREPQVYTLPPSRDELTKNQVSLSCAVKGFYPSDIAVEWESNGQPENNYKTTPPVLDSDGSFFLVSKLTVDKSRWQQGNVFSCSVMHEALHNHYTQKSLSLSPG

SEQ ID NO: 185 - protein, 451 aa, artificial
  Synthetic polypeptide
ELQLQESGPGLVKPSETLSLTCTVSGGSITASNYYWGWIRQPPGKGLEWIGSIDYTGSTYYEPSLKSRVTISVDTSKNQFSLKLSSVTAADTAVYYCATGSYYETYLGFDVWGQGTLVTVSSASTKGPSVFPLAPSSKSTSGGTAALGCLVKDYFPEPVTVSWNSGALTSGVHTFPAVLQSSGLYSLSSVVTVPSSSLGTQTYICNVNHKPSNTKVDKKVEPKSCDKTHTCPPCPAPELLGGPSVFLFPPKPKDTLMISRTPEVTCVVVDVSHEDPEVKFNWYVDGVEVHNAKTKPREEQYGSTYRVVSVLTVLHQDWLNGKEYKCKVSNKALPAPIEKTISKAKGQPREPQVYTLPPSRDELTKNQVSLTCLVKGFYPSDIAVEWESNGQPENNYKTTPPVLDSDGSFFLYSKLTVDKSRWQQGNVFSCSVMHEALHNHYTQKSLSLSPG

SEQ ID NO: 186 - protein, 451 aa, artificial
  Synthetic polypeptide
ELQLQESGPGLVKPSETLSLTCTVSGGSITASNYYWGWIRQPPGKGLEWIGSIDYTGSTYYEPSLKSRVTISVDTSKNQFSLKLSSVTAADTAVYYCATGSYYETYLGFDVWGQGTLVTVSSASTKGPSVFPLAPSSKSTSGGTAALGCLVKDYFPEPVTVSWNSGALTSGVHTFPAVLQSSGLYSLSSVVTVPSSSLGTQTYICNVNHKPSNTKVDKKVEPKSCDKTHTCPPCPAPELLGGPSVFLFPPKPKDTLMISRTPEVTCVVVDVSHEDPEVKFNWYVDGVEVHNAKTKPREEQYGSTYRVVSVLTVLHQDWLNGKEYKCKVSNKALPAPIEKTISKAKGQPREPQVYTLPPSRDELTKNQVSLWCLVKGFYPSDIAVEWESNGQPENNYKTTPPVLDSDGSFFLYSKLTVDKSRWQQGNVFSCSVMHEALHNHYTQKSLSLSPG

SEQ ID NO: 187 - protein, 451 aa, artificial
  Synthetic polypeptide
ELQLQESGPGLVKPSETLSLTCTVSGGSITASNYYWGWIRQPPGKGLEWIGSIDYTGSTYYEPSLKSRVTISVDTSKNQFSLKLSSVTAADTAVYYCATGSYYETYLGFDVWGQGTLVTVSSASTKGPSVFPLAPSSKSTSGGTAALGCLVKDYFPEPVTVSWNSGALTSGVHTFPAVLQSSGLYSLSSVVTVPSSSLGTQTYICNVNHKPSNTKVDKKVEPKSCDKTHTCPPCPAPELLGGPSVFLFPPKPKDTLMISRTPEVTCVVVDVSHEDPEVKFNWYVDGVEVHNAKTKPREEQYGSTYRVVSVLTVLHQDWLNGKEYKCKVSNKALPAPIEKTISKAKGQPREPQVYTLPPSRDELTKNQVSLSCAVKGFYPSDIAVEWESNGQPENNYKTTPPVLDSDGSFFLVSKLTVDKSRWQQGNVFSCSVMHEALHNHYTQKSLSLSPG

SEQ ID NO: 188 - protein, 451 aa, artificial
  Synthetic polypeptide
ELQLQESGPGLVKPSETLSLTCTVSGGSITASNYYWGWIRQPPGKGLEWIGSIDYTGSTYYEPSLKSRVTISVDTSKNQFSLKLSSVTAADTAVYYCATGNYYETYLGFDVWGQGTLVTVSSASTKGPSVFPLAPSSKSTSGGTAALGCLVKDYFPEPVTVSWNSGALTSGVHTFPAVLQSSGLYSLSSVVTVPSSSLGTQTYICNVNHKPSNTKVDKKVEPKSCDKTHTCPPCPAPELLGGPSVFLFPPKPKDTLMISRTPEVTCVVVDVSHEDPEVKFNWYVDGVEVHNAKTKPREEQYGSTYRVVSVLTVLHQDWLNGKEYKCKVSNKALPAPIEKTISKAKGQPREPQVYTLPPSRDELTKNQVSLTCLVKGFYPSDIAVEWESNGQPENNYKTTPPVLDSDGSFFLYSKLTVDKSRWQQGNVFSCSVMHEALHNHYTQKSLSLSPG

SEQ ID NO: 189 - protein, 451 aa, artificial
  Synthetic polypeptide
ELQLQESGPGLVKPSETLSLTCTVSGGSITASNYYWGWIRQPPGKGLEWIGSIDYTGSTYYEPSLKSRVTISVDTSKNQFSLKLSSVTAADTAVYYCATGNYYETYLGFDVWGQGTLVTVSSASTKGPSVFPLAPSSKSTSGGTAALGCLVKDYFPEPVTVSWNSGALTSGVHTFPAVLQSSGLYSLSSVVTVPSSSLGTQTYICNVNHKPSNTKVDKKVEPKSCDKTHTCPPCPAPELLGGPSVFLFPPKPKDTLMISRTPEVTCVVVDVSHEDPEVKFNWYVDGVEVHNAKTKPREEQYGSTYRVVSVLTVLHQDWLNGKEYKCKVSNKALPAPIEKTISKAKGQPREPQVYTLPPSRDELTKNQVSLWCLVKGFYPSDIAVEWESNGQPENNYKTTPPVLDSDGSFFLYSKLTVDKSRWQQGNVFSCSVMHEALHNHYTQKSLSLSPG

SEQ ID NO: 190 - protein, 451 aa, artificial
  Synthetic polypeptide
ELQLQESGPGLVKPSETLSLTCTVSGGSITASNYYWGWIRQPPGKGLEWIGSIDYTGSTYYEPSLKSRVTISVDTSKNQFSLKLSSVTAADTAVYYCATGNYYETYLGFDVWGQGTLVTVSSASTKGPSVFPLAPSSKSTSGGTAALGCLVKDYFPEPVTVSWNSGALTSGVHTFPAVLQSSGLYSLSSVVTVPSSSLGTQTYICNVNHKPSNTKVDKKVEPKSCDKTHTCPPCPAPELLGGPSVFLFPPKPKDTLMISRTPEVTCVVVDVSHEDPEVKFNWYVDGVEVHNAKTKPREEQYGSTYRVVSVLTVLHQDWLNGKEYKCKVSNKALPAPIEKTISKAKGQPREPQVYTLPPSRDELTKNQVSLSCAVKGFYPSDIAVEWESNGQPENNYKTTPPVLDSDGSFFLVSKLTVDKSRWQQGNVFSCSVMHEALHNHYTQKSLSLSPG

SEQ ID NO: 191 - protein, 451 aa, artificial
  Synthetic polypeptide
ELQLQESGPGLVKPSETLSLTCTVSGGSITASNTYWGWIRQPPGKGLEWIGSIDYTGSTYYNPSLKSRVTISVDTSKNQFSLKLSSVTAADTAVYYCATGKYYETYLGFDVWGQGTLVTVSSASTKGPSVFPLAPSSKSTSGGTAALGCLVKDYFPEPVTVSWNSGALTSGVHTFPAVLQSSGLYSLSSVVTVPSSSLGTQTYICNVNHKPSNTKVDKKVEPKSCDKTHTCPPCPAPELLGGPSVFLFPPKPKDTLMISRTPEVTCVVVDVSHEDPEVKFNWYVDGVEVHNAKTKPREEQYGSTYRVVSVLTVLHQDWLNGKEYKCKVSNKALPAPIEKTISKAKGQPREPQVYTLPPSRDELTKNQVSLTCLVKGFYPSDIAVEWESNGQPENNYKTTPPVLDSDGSFFLYSKLTVDKSRWQQGNVFSCSVMHEALHNHYTQKSLSLSPG

SEQ ID NO: 192 - protein, 451 aa, artificial
  Synthetic polypeptide
ELQLQESGPGLVKPSETLSLTCTVSGGSITASNTYWGWIRQPPGKGLEWIGSIDYTGSTYYNPSLKSRVTISVDTSKNQFSLKLSSVTAADTAVYYCATGKYYETYLGFDVWGQGTLVTVSSASTKGPSVFPLAPSSKSTSGGTAALGCLVKDYFPEPVTVSWNSGALTSGVHTFPAVLQSSGLYSLSSVVTVPSSSLGTQTYICNVNHKPSNTKVDKKVEPKSCDKTHTCPPCPAPELLGGPSVFLFPPKPKDTLMISRTPEVTCVVVDVSHEDPEVKFNWYVDGVEVHNAKTKPREEQYGSTYRVVSVLTVLHQDWLNGKEYKCKVSNKALPAPIEKTISKAKGQPREPQVYTLPPSRDELTKNQVSLWCLVKGFYPSDIAVEWESNGQPENNYKTTPPVLDSDGSFFLYSKLTVDKSRWQQGNVFSCSVMHEALHNHYTQKSLSLSPG

SEQ ID NO: 193 - protein, 451 aa, artificial
  Synthetic polypeptide
ELQLQESGPGLVKPSETLSLTCTVSGGSITASNTYWGWIRQPPGKGLEWIGSIDYTGSTYYNPSLKSRVTISVDTSKNQFSLKLSSVTAADTAVYYCATGKYYETYLGFDVWGQGTLVTVSSASTKGPSVFPLAPSSKSTSGGTAALGCLVKDYFPEPVTVSWNSGALTSGVHTFPAVLQSSGLYSLSSVVTVPSSSLGTQTYICNVNHKPSNTKVDKKVEPKSCDKTHTCPPCPAPELLGGPSVFLFPPKPKDTLMISRTPEVTCVVVDVSHEDPEVKFNWYVDGVEVHNAKTKPREEQYGSTYRVVSVLTVLHQDWLNGKEYKCKVSNKALPAPIEKTISKAKGQPREPQVYTLPPSRDELTKNQVSLSCAVKGFYPSDIAVEWESNGQPENNYKTTPPVLDSDGSFFLVSKLTVDKSRWQQGNVFSCSVMHEALHNHYTQKSLSLSPG

SEQ ID NO: 194 - protein, 451 aa, artificial
  Synthetic polypeptide
ELQLQESGPGLVKPSETLSLTCTVSGGSITASNYYWGWIRQPPGKGLEWIGSIDYTGSTYYNPSLKSRVTISVDTSKNQFSLKLSSVTAADTAVYYCASGKYYETYLGFDVWGQGTLVTVSSASTKGPSVFPLAPSSKSTSGGTAALGCLVKDYFPEPVTVSWNSGALTSGVHTFPAVLQSSGLYSLSSVVTVPSSSLGTQTYICNVNHKPSNTKVDKKVEPKSCDKTHTCPPCPAPELLGGPSVFLFPPKPKDTLMISRTPEVTCVVVDVSHEDPEVKFNWYVDGVEVHNAKTKPREEQYGSTYRVVSVLTVLHQDWLNGKEYKCKVSNKALPAPIEKTISKAKGQPREPQVYTLPPSRDELTKNQVSLTCLVKGFYPSDIAVEWESNGQPENNYKTTPPVLDSDGSFFLYSKLTVDKSRWQQGNVFSCSVMHEALHNHYTQKSLSLSPG

SEQ ID NO: 195 - protein, 451 aa, artificial
  Synthetic polypeptide
ELQLQESGPGLVKPSETLSLTCTVSGGSITASNYYWGWIRQPPGKGLEWIGSIDYTGSTYYNPSLKSRVTISVDTSKNQFSLKLSSVTAADTAVYYCASGKYYETYLGFDVWGQGTLVTVSSASTKGPSVFPLAPSSKSTSGGTAALGCLVKDYFPEPVTVSWNSGALTSGVHTFPAVLQSSGLYSLSSVVTVPSSSLGTQTYICNVNHKPSNTKVDKKVEPKSCDKTHTCPPCPAPELLGGPSVFLFPPKPKDTLMISRTPEVTCVVVDVSHEDPEVKFNWYVDGVEVHNAKTKPREEQYGSTYRVVSVLTVLHQDWLNGKEYKCKVSNKALPAPIEKTISKAKGQPREPQVYTLPPSRDELTKNQVSLWCLVKGFYPSDIAVEWESNGQPENNYKTTPPVLDSDGSFFLYSKLTVDKSRWQQGNVFSCSVMHEALHNHYTQKSLSLSPG

SEQ ID NO: 196 - protein, 451 aa, artificial
  Synthetic polypeptide
ELQLQESGPGLVKPSETLSLTCTVSGGSITASNYYWGWIRQPPGKGLEWIGSIDYTGSTYYNPSLKSRVTISVDTSKNQFSLKLSSVTAADTAVYYCASGKYYETYLGFDVWGQGTLVTVSSASTKGPSVFPLAPSSKSTSGGTAALGCLVKDYFPEPVTVSWNSGALTSGVHTFPAVLQSSGLYSLSSVVTVPSSSLGTQTYICNVNHKPSNTKVDKKVEPKSCDKTHTCPPCPAPELLGGPSVFLFPPKPKDTLMISRTPEVTCVVVDVSHEDPEVKFNWYVDGVEVHNAKTKPREEQYGSTYRVVSVLTVLHQDWLNGKEYKCKVSNKALPAPIEKTISKAKGQPREPQVYTLPPSRDELTKNQVSLSCAVKGFYPSDIAVEWESNGQPENNYKTTPPVLDSDGSFFLVSKLTVDKSRWQQGNVFSCSVMHEALHNHYTQKSLSLSPG

SEQ ID NO: 197 - protein, 451 aa, artificial
  Synthetic polypeptide
ELQLQESGPGLVKPSETLSLTCTVSGGSITSSNYYWGWIRQPPGKGLEWIGSIDYTGSTYYNPSLKSRVTISVDTSKNQFSLKLSSVTAADTAVYYCATGKYYETYLGFDVWGQGTLVTVSSASTKGPSVFPLAPSSKSTSGGTAALGCLVKDYFPEPVTVSWNSGALTSGVHTFPAVLQSSGLYSLSSVVTVPSSSLGTQTYICNVNHKPSNTKVDKKVEPKSCDKTHTCPPCPAPELLGGPSVFLFPPKPKDTLMISRTPEVTCVVVDVSHEDPEVKFNWYVDGVEVHNAKTKPREEQYGSTYRVVSVLTVLHQDWLNGKEYKCKVSNKALPAPIEKTISKAKGQPREPQVYTLPPSRDELTKNQVSLTCLVKGFYPSDIAVEWESNGQPENNYKTTPPVLDSDGSFFLYSKLTVDKSRWQQGNVFSCSVMHEALHNHYTQKSLSLSPG

SEQ ID NO: 198 - protein, 451 aa, artificial
  Synthetic polypeptide
ELQLQESGPGLVKPSETLSLTCTVSGGSITSSNYYWGWIRQPPGKGLEWIGSIDYTGSTYYNPSLKSRVTISVDTSKNQFSLKLSSVTAADTAVYYCATGKYYETYLGFDVWGQGTLVTVSSASTKGPSVFPLAPSSKSTSGGTAALGCLVKDYFPEPVTVSWNSGALTSGVHTFPAVLQSSGLYSLSSVVTVPSSSLGTQTYICNVNHKPSNTKVDKKVEPKSCDKTHTCPPCPAPELLGGPSVFLFPPKPKDTLMISRTPEVTCVVVDVSHEDPEVKFNWYVDGVEVHNAKTKPREEQYGSTYRVVSVLTVLHQDWLNGKEYKCKVSNKALPAPIEKTISKAKGQPREPQVYTLPPSRDELTKNQVSLWCLVKGFYPSDIAVEWESNGQPENNYKTTPPVLDSDGSFFLYSKLTVDKSRWQQGNVFSCSVMHEALHNHYTQKSLSLSPG

SEQ ID NO: 199 - protein, 451 aa, artificial
  Synthetic polypeptide
ELQLQESGPGLVKPSETLSLTCTVSGGSITSSNYYWGWIRQPPGKGLEWIGSIDYTGSTYYNPSLKSRVTISVDTSKNQFSLKLSSVTAADTAVYYCATGKYYETYLGFDVWGQGTLVTVSSASTKGPSVFPLAPSSKSTSGGTAALGCLVKDYFPEPVTVSWNSGALTSGVHTFPAVLQSSGLYSLSSVVTVPSSSLGTQTYICNVNHKPSNTKVDKKVEPKSCDKTHTCPPCPAPELLGGPSVFLFPPKPKDTLMISRTPEVTCVVVDVSHEDPEVKFNWYVDGVEVHNAKTKPREEQYGSTYRVVSVLTVLHQDWLNGKEYKCKVSNKALPAPIEKTISKAKGQPREPQVYTLPPSRDELTKNQVSLSCAVKGFYPSDIAVEWESNGQPENNYKTTPPVLDSDGSFFLVSKLTVDKSRWQQGNVFSCSVMHEALHNHYTQKSLSLSPG

SEQ ID NO: 200 - protein, 451 aa, artificial
  Synthetic polypeptide
ELQLQESGPGLVKPSETLSLTCTVSGGSITSSNYYWGWIRQPPGKGLEWIGSIDYTGSTYYQPSLKSRVTISVDTSKNQFSLKLSSVTAADTAVYYCARGNYYETYLGFDVWGQGTLVTVSSASTKGPSVFPLAPSSKSTSGGTAALGCLVKDYFPEPVTVSWNSGALTSGVHTFPAVLQSSGLYSLSSVVTVPSSSLGTQTYICNVNHKPSNTKVDKKVEPKSCDKTHTCPPCPAPELLGGPSVFLFPPKPKDTLMISRTPEVTCVVVDVSHEDPEVKFNWYVDGVEVHNAKTKPREEQYGSTYRVVSVLTVLHQDWLNGKEYKCKVSNKALPAPIEKTISKAKGQPREPQVYTLPPSRDELTKNQVSLTCLVKGFYPSDIAVEWESNGQPENNYKTTPPVLDSDGSFFLYSKLTVDKSRWQQGNVFSCSVMHEALHNHYTQKSLSLSPG

SEQ ID NO: 201 - protein, 451 aa, artificial
  Synthetic polypeptide
ELQLQESGPGLVKPSETLSLTCTVSGGSITSSNYYWGWIRQPPGKGLEWIGSIDYTGSTYYQPSLKSRVTISVDTSKNQFSLKLSSVTAADTAVYYCARGNYYETYLGFDVWGQGTLVTVSSASTKGPSVFPLAPSSKSTSGGTAALGCLVKDYFPEPVTVSWNSGALTSGVHTFPAVLQSSGLYSLSSVVTVPSSSLGTQTYICNVNHKPSNTKVDKKVEPKSCDKTHTCPPCPAPELLGGPSVFLFPPKPKDTLMISRTPEVTCVVVDVSHEDPEVKFNWYVDGVEVHNAKTKPREEQYGSTYRVVSVLTVLHQDWLNGKEYKCKVSNKALPAPIEKTISKAKGQPREPQVYTLPPSRDELTKNQVSLWCLVKGFYPSDIAVEWESNGQPENNYKTTPPVLDSDGSFFLYSKLTVDKSRWQQGNVFSCSVMHEALHNHYTQKSLSLSPG

SEQ ID NO: 202 - protein, 451 aa, artificial
  Synthetic polypeptide
ELQLQESGPGLVKPSETLSLTCTVSGGSITSSNYYWGWIRQPPGKGLEWIGSIDYTGSTYYQPSLKSRVTISVDTSKNQFSLKLSSVTAADTAVYYCARGNYYETYLGFDVWGQGTLVTVSSASTKGPSVFPLAPSSKSTSGGTAALGCLVKDYFPEPVTVSWNSGALTSGVHTFPAVLQSSGLYSLSSVVTVPSSSLGTQTYICNVNHKPSNTKVDKKVEPKSCDKTHTCPPCPAPELLGGPSVFLFPPKPKDTLMISRTPEVTCVVVDVSHEDPEVKFNWYVDGVEVHNAKTKPREEQYGSTYRVVSVLTVLHQDWLNGKEYKCKVSNKALPAPIEKTISKAKGQPREPQVYTLPPSRDELTKNQVSLSCAVKGFYPSDIAVEWESNGQPENNYKTTPPVLDSDGSFFLVSKLTVDKSRWQQGNVFSCSVMHEALHNHYTQKSLSLSPG

SEQ ID NO: 203 - protein, 452 aa, artificial
  Synthetic polypeptide
ELQLQESGPGLVKPSETLSLTCTVSGGSISTSSYYWGWIRQPPGKGLEWIGSIYYTGNTYYNPSLKSRVTISVDTSKNQFSLKLSSVTAADTAVYYCARVRYGVGVPRYFDPWGQGTLVTVSSASTKGPSVFPLAPSSKSTSGGTAALGCLVKDYFPEPVTVSWNSGALTSGVHTFPAVLQSSGLYSLSSVVTVPSSSLGTQTYICNVNHKPSNTKVDKKVEPKSCDKTHTCPPCPAPELLGGPSVFLFPPKPKDTLMISRTPEVTCVVVDVSHEDPEVKFNWYVDGVEVHNAKTKPREEQYGSTYRVVSVLTVLHQDWLNGKEYKCKVSNKALPAPIEKTISKAKGQPREPQVYTLPPSRDELTKNQVSLTCLVKGFYPSDIAVEWESNGQPENNYKTTPPVLDSDGSFFLYSKLTVDKSRWQQGNVFSCSVMHEALHNHYTQKSLSLSPG

SEQ ID NO: 204 - protein, 452 aa, artificial
  Synthetic polypeptide
ELQLQESGPGLVKPSETLSLTCTVSGGSISTSSYYWGWIRQPPGKGLEWIGSIYYTGNTYYNPSLKSRVTISVDTSKNQFSLKLSSVTAADTAVYYCARVRYGVGVPRYFDPWGQGTLVTVSSASTKGPSVFPLAPSSKSTSGGTAALGCLVKDYFPEPVTVSWNSGALTSGVHTFPAVLQSSGLYSLSSVVTVPSSSLGTQTYICNVNHKPSNTKVDKKVEPKSCDKTHTCPPCPAPELLGGPSVFLFPPKPKDTLMISRTPEVTCVVVDVSHEDPEVKFNWYVDGVEVHNAKTKPREEQYGSTYRVVSVLTVLHQDWLNGKEYKCKVSNKALPAPIEKTISKAKGQPREPQVYTLPPSRDELTKNQVSLWCLVKGFYPSDIAVEWESNGQPENNYKTTPPVLDSDGSFFLYSKLTVDKSRWQQGNVFSCSVMHEALHNHYTQKSLSLSPG

SEQ ID NO: 205 - protein, 452 aa, artificial
  Synthetic polypeptide
ELQLQESGPGLVKPSETLSLTCTVSGGSISTSSYYWGWIRQPPGKGLEWIGSIYYTGNTYYNPSLKSRVTISVDTSKNQFSLKLSSVTAADTAVYYCARVRYGVGVPRYFDPWGQGTLVTVSSASTKGPSVFPLAPSSKSTSGGTAALGCLVKDYFPEPVTVSWNSGALTSGVHTFPAVLQSSGLYSLSSVVTVPSSSLGTQTYICNVNHKPSNTKVDKKVEPKSCDKTHTCPPCPAPELLGGPSVFLFPPKPKDTLMISRTPEVTCVVVDVSHEDPEVKFNWYVDGVEVHNAKTKPREEQYGSTYRVVSVLTVLHQDWLNGKEYKCKVSNKALPAPIEKTISKAKGQPREPQVYTLPPSRDELTKNQVSLSCAVKGFYPSDIAVEWESNGQPENNYKTTPPVLDSDGSFFLVSKLTVDKSRWQQGNVFSCSVMHEALHNHYTQKSLSLSPG

SEQ ID NO: 206 - protein, 452 aa, artificial
  Synthetic polypeptide
ELQLQESGPGLVKPSETLSLTCTVSGGSISDSSYYWGWIRQPPGKGLEWIGSIYYTGNTYYNSSLKSRVTISVDTSKNQFSLKLSSVTAADTAVYYCARVRYGVGVPRYFDPWGQGTLVTVSSASTKGPSVFPLAPSSKSTSGGTAALGCLVKDYFPEPVTVSWNSGALTSGVHTFPAVLQSSGLYSLSSVVTVPSSSLGTQTYICNVNHKPSNTKVDKKVEPKSCDKTHTCPPCPAPELLGGPSVFLFPPKPKDTLMISRTPEVTCVVVDVSHEDPEVKFNWYVDGVEVHNAKTKPREEQYGSTYRVVSVLTVLHQDWLNGKEYKCKVSNKALPAPIEKTISKAKGQPREPQVYTLPPSRDELTKNQVSLTCLVKGFYPSDIAVEWESNGQPENNYKTTPPVLDSDGSFFLYSKLTVDKSRWQQGNVFSCSVMHEALHNHYTQKSLSLSPG

SEQ ID NO: 207 - protein, 452 aa, artificial
  Synthetic polypeptide
ELQLQESGPGLVKPSETLSLTCTVSGGSISDSSYYWGWIRQPPGKGLEWIGSIYYTGNTYYNSSLKSRVTISVDTSKNQFSLKLSSVTAADTAVYYCARVRYGVGVPRYFDPWGQGTLVTVSSASTKGPSVFPLAPSSKSTSGGTAALGCLVKDYFPEPVTVSWNSGALTSGVHTFPAVLQSSGLYSLSSVVTVPSSSLGTQTYICNVNHKPSNTKVDKKVEPKSCDKTHTCPPCPAPELLGGPSVFLFPPKPKDTLMISRTPEVTCVVVDVSHEDPEVKFNWYVDGVEVHNAKTKPREEQYGSTYRVVSVLTVLHQDWLNGKEYKCKVSNKALPAPIEKTISKAKGQPREPQVYTLPPSRDELTKNQVSLWCLVKGFYPSDIAVEWESNGQPENNYKTTPPVLDSDGSFFLYSKLTVDKSRWQQGNVFSCSVMHEALHNHYTQKSLSLSPG

SEQ ID NO: 208 - protein, 452 aa, artificial
  Synthetic polypeptide
ELQLQESGPGLVKPSETLSLTCTVSGGSISDSSYYWGWIRQPPGKGLEWIGSIYYTGNTYYNSSLKSRVTISVDTSKNQFSLKLSSVTAADTAVYYCARVRYGVGVPRYFDPWGQGTLVTVSSASTKGPSVFPLAPSSKSTSGGTAALGCLVKDYFPEPVTVSWNSGALTSGVHTFPAVLQSSGLYSLSSVVTVPSSSLGTQTYICNVNHKPSNTKVDKKVEPKSCDKTHTCPPCPAPELLGGPSVFLFPPKPKDTLMISRTPEVTCVVVDVSHEDPEVKFNWYVDGVEVHNAKTKPREEQYGSTYRVVSVLTVLHQDWLNGKEYKCKVSNKALPAPIEKTISKAKGQPREPQVYTLPPSRDELTKNQVSLSCAVKGFYPSDIAVEWESNGQPENNYKTTPPVLDSDGSFFLVSKLTVDKSRWQQGNVFSCSVMHEALHNHYTQKSLSLSPG

SEQ ID NO: 209 - protein, 452 aa, artificial
  Synthetic polypeptide
ELQLQESGPGLVKPSETLSLTCTVSGGSISESSYYWGWIRQPPGKGLEWIGSIYYTGNTYYNPSLKSRVTISVDTSKNQFSLKLSSVTAADTAVYYCAGVRYGVGVPRYFDPWGQGTLVTVSSASTKGPSVFPLAPSSKSTSGGTAALGCLVKDYFPEPVTVSWNSGALTSGVHTFPAVLQSSGLYSLSSVVTVPSSSLGTQTYICNVNHKPSNTKVDKKVEPKSCDKTHTCPPCPAPELLGGPSVFLFPPKPKDTLMISRTPEVTCVVVDVSHEDPEVKFNWYVDGVEVHNAKTKPREEQYGSTYRVVSVLTVLHQDWLNGKEYKCKVSNKALPAPIEKTISKAKGQPREPQVYTLPPSRDELTKNQVSLTCLVKGFYPSDIAVEWESNGQPENNYKTTPPVLDSDGSFFLYSKLTVDKSRWQQGNVFSCSVMHEALHNHYTQKSLSLSPG

SEQ ID NO: 210 - protein, 452 aa, artificial
  Synthetic polypeptide
ELQLQESGPGLVKPSETLSLTCTVSGGSISESSYYWGWIRQPPGKGLEWIGSIYYTGNTYYNPSLKSRVTISVDTSKNQFSLKLSSVTAADTAVYYCAGVRYGVGVPRYFDPWGQGTLVTVSSASTKGPSVFPLAPSSKSTSGGTAALGCLVKDYFPEPVTVSWNSGALTSGVHTFPAVLQSSGLYSLSSVVTVPSSSLGTQTYICNVNHKPSNTKVDKKVEPKSCDKTHTCPPCPAPELLGGPSVFLFPPKPKDTLMISRTPEVTCVVVDVSHEDPEVKFNWYVDGVEVHNAKTKPREEQYGSTYRVVSVLTVLHQDWLNGKEYKCKVSNKALPAPIEKTISKAKGQPREPQVYTLPPSRDELTKNQVSLWCLVKGFYPSDIAVEWESNGQPENNYKTTPPVLDSDGSFFLYSKLTVDKSRWQQGNVFSCSVMHEALHNHYTQKSLSLSPG

SEQ ID NO: 211 - protein, 452 aa, artificial
  Synthetic polypeptide
ELQLQESGPGLVKPSETLSLTCTVSGGSISESSYYWGWIRQPPGKGLEWIGSIYYTGNTYYNPSLKSRVTISVDTSKNQFSLKLSSVTAADTAVYYCAGVRYGVGVPRYFDPWGQGTLVTVSSASTKGPSVFPLAPSSKSTSGGTAALGCLVKDYFPEPVTVSWNSGALTSGVHTFPAVLQSSGLYSLSSVVTVPSSSLGTQTYICNVNHKPSNTKVDKKVEPKSCDKTHTCPPCPAPELLGGPSVFLFPPKPKDTLMISRTPEVTCVVVDVSHEDPEVKFNWYVDGVEVHNAKTKPREEQYGSTYRVVSVLTVLHQDWLNGKEYKCKVSNKALPAPIEKTISKAKGQPREPQVYTLPPSRDELTKNQVSLSCAVKGFYPSDIAVEWESNGQPENNYKTTPPVLDSDGSFFLVSKLTVDKSRWQQGNVFSCSVMHEALHNHYTQKSLSLSPG

SEQ ID NO: 212 - protein, 452 aa, artificial
  Synthetic polypeptide
ELQLQESGPGLVKPSETLSLTCTVSGGSISTSSDYWGWIRQPPGKGLEWIGSIYYTGNTYYLPSLKSRVTISVDTSKNQFSLKLSSVTAADTAVYYCSRVRYGVGVPRYFDPWGQGTLVTVSSASTKGPSVFPLAPSSKSTSGGTAALGCLVKDYFPEPVTVSWNSGALTSGVHTFPAVLQSSGLYSLSSVVTVPSSSLGTQTYICNVNHKPSNTKVDKKVEPKSCDKTHTCPPCPAPELLGGPSVFLFPPKPKDTLMISRTPEVTCVVVDVSHEDPEVKFNWYVDGVEVHNAKTKPREEQYGSTYRVVSVLTVLHQDWLNGKEYKCKVSNKALPAPIEKTISKAKGQPREPQVYTLPPSRDELTKNQVSLTCLVKGFYPSDIAVEWESNGQPENNYKTTPPVLDSDGSFFLYSKLTVDKSRWQQGNVFSCSVMHEALHNHYTQKSLSLSPG

SEQ ID NO: 213 - protein, 452 aa, artificial
  Synthetic polypeptide
ELQLQESGPGLVKPSETLSLTCTVSGGSISTSSDYWGWIRQPPGKGLEWIGSIYYTGNTYYLPSLKSRVTISVDTSKNQFSLKLSSVTAADTAVYYCSRVRYGVGVPRYFDPWGQGTLVTVSSASTKGPSVFPLAPSSKSTSGGTAALGCLVKDYFPEPVTVSWNSGALTSGVHTFPAVLQSSGLYSLSSVVTVPSSSLGTQTYICNVNHKPSNTKVDKKVEPKSCDKTHTCPPCPAPELLGGPSVFLFPPKPKDTLMISRTPEVTCVVVDVSHEDPEVKFNWYVDGVEVHNAKTKPREEQYGSTYRVVSVLTVLHQDWLNGKEYKCKVSNKALPAPIEKTISKAKGQPREPQVYTLPPSRDELTKNQVSLWCLVKGFYPSDIAVEWESNGQPENNYKTTPPVLDSDGSFFLYSKLTVDKSRWQQGNVFSCSVMHEALHNHYTQKSLSLSPG

SEQ ID NO: 214 - protein, 452 aa, artificial
  Synthetic polypeptide
ELQLQESGPGLVKPSETLSLTCTVSGGSISTSSDYWGWIRQPPGKGLEWIGSIYYTGNTYYLPSLKSRVTISVDTSKNQFSLKLSSVTAADTAVYYCSRVRYGVGVPRYFDPWGQGTLVTVSSASTKGPSVFPLAPSSKSTSGGTAALGCLVKDYFPEPVTVSWNSGALTSGVHTFPAVLQSSGLYSLSSVVTVPSSSLGTQTYICNVNHKPSNTKVDKKVEPKSCDKTHTCPPCPAPELLGGPSVFLFPPKPKDTLMISRTPEVTCVVVDVSHEDPEVKFNWYVDGVEVHNAKTKPREEQYGSTYRVVSVLTVLHQDWLNGKEYKCKVSNKALPAPIEKTISKAKGQPREPQVYTLPPSRDELTKNQVSLSCAVKGFYPSDIAVEWESNGQPENNYKTTPPVLDSDGSFFLVSKLTVDKSRWQQGNVFSCSVMHEALHNHYTQKSLSLSPG

SEQ ID NO: 215 - protein, 452 aa, artificial
  Synthetic polypeptide
ELQLQESGPGLVKPSETLSLTCTVSGGSISNSSYYWGWIRQPPGKGLEWIGSIYYTGNTYYLPSLKSRVTISVDTSKNQFSLKLSSVTAADTAVYYCARVRYGVGVPRYFDPWGQGTLVTVSSASTKGPSVFPLAPSSKSTSGGTAALGCLVKDYFPEPVTVSWNSGALTSGVHTFPAVLQSSGLYSLSSVVTVPSSSLGTQTYICNVNHKPSNTKVDKKVEPKSCDKTHTCPPCPAPELLGGPSVFLFPPKPKDTLMISRTPEVTCVVVDVSHEDPEVKFNWYVDGVEVHNAKTKPREEQYGSTYRVVSVLTVLHQDWLNGKEYKCKVSNKALPAPIEKTISKAKGQPREPQVYTLPPSRDELTKNQVSLTCLVKGFYPSDIAVEWESNGQPENNYKTTPPVLDSDGSFFLYSKLTVDKSRWQQGNVFSCSVMHEALHNHYTQKSLSLSPG

SEQ ID NO: 216 - protein, 452 aa, artificial
  Synthetic polypeptide
ELQLQESGPGLVKPSETLSLTCTVSGGSISNSSYYWGWIRQPPGKGLEWIGSIYYTGNTYYLPSLKSRVTISVDTSKNQFSLKLSSVTAADTAVYYCARVRYGVGVPRYFDPWGQGTLVTVSSASTKGPSVFPLAPSSKSTSGGTAALGCLVKDYFPEPVTVSWNSGALTSGVHTFPAVLQSSGLYSLSSVVTVPSSSLGTQTYICNVNHKPSNTKVDKKVEPKSCDKTHTCPPCPAPELLGGPSVFLFPPKPKDTLMISRTPEVTCVVVDVSHEDPEVKFNWYVDGVEVHNAKTKPREEQYGSTYRVVSVLTVLHQDWLNGKEYKCKVSNKALPAPIEKTISKAKGQPREPQVYTLPPSRDELTKNQVSLWCLVKGFYPSDIAVEWESNGQPENNYKTTPPVLDSDGSFFLYSKLTVDKSRWQQGNVFSCSVMHEALHNHYTQKSLSLSPG

SEQ ID NO: 217 - protein, 452 aa, artificial
  Synthetic polypeptide
ELQLQESGPGLVKPSETLSLTCTVSGGSISNSSYYWGWIRQPPGKGLEWIGSIYYTGNTYYLPSLKSRVTISVDTSKNQFSLKLSSVTAADTAVYYCARVRYGVGVPRYFDPWGQGTLVTVSSASTKGPSVFPLAPSSKSTSGGTAALGCLVKDYFPEPVTVSWNSGALTSGVHTFPAVLQSSGLYSLSSVVTVPSSSLGTQTYICNVNHKPSNTKVDKKVEPKSCDKTHTCPPCPAPELLGGPSVFLFPPKPKDTLMISRTPEVTCVVVDVSHEDPEVKFNWYVDGVEVHNAKTKPREEQYGSTYRVVSVLTVLHQDWLNGKEYKCKVSNKALPAPIEKTISKAKGQPREPQVYTLPPSRDELTKNQVSLSCAVKGFYPSDIAVEWESNGQPENNYKTTPPVLDSDGSFFLVSKLTVDKSRWQQGNVFSCSVMHEALHNHYTQKSLSLSPG

SEQ ID NO: 218 - protein, 452 aa, artificial
  Synthetic polypeptide
ELQLQESGPGLVKPSETLSLTCTVSGGSISESSYYWGWIRQPPGKGLEWIGSIYYTGNTYYLPSLKSRVTISVDTSKNQFSLKLSSVTAADTAVYYCARVRYGVGVPRYFDPWGQGTLVTVSSASTKGPSVFPLAPSSKSTSGGTAALGCLVKDYFPEPVTVSWNSGALTSGVHTFPAVLQSSGLYSLSSVVTVPSSSLGTQTYICNVNHKPSNTKVDKKVEPKSCDKTHTCPPCPAPELLGGPSVFLFPPKPKDTLMISRTPEVTCVVVDVSHEDPEVKFNWYVDGVEVHNAKTKPREEQYGSTYRVVSVLTVLHQDWLNGKEYKCKVSNKALPAPIEKTISKAKGQPREPQVYTLPPSRDELTKNQVSLTCLVKGFYPSDIAVEWESNGQPENNYKTTPPVLDSDGSFFLYSKLTVDKSRWQQGNVFSCSVMHEALHNHYTQKSLSLSPG

SEQ ID NO: 219 - protein, 452 aa, artificial
  Synthetic polypeptide
ELQLQESGPGLVKPSETLSLTCTVSGGSISESSYYWGWIRQPPGKGLEWIGSIYYTGNTYYLPSLKSRVTISVDTSKNQFSLKLSSVTAADTAVYYCARVRYGVGVPRYFDPWGQGTLVTVSSASTKGPSVFPLAPSSKSTSGGTAALGCLVKDYFPEPVTVSWNSGALTSGVHTFPAVLQSSGLYSLSSVVTVPSSSLGTQTYICNVNHKPSNTKVDKKVEPKSCDKTHTCPPCPAPELLGGPSVFLFPPKPKDTLMISRTPEVTCVVVDVSHEDPEVKFNWYVDGVEVHNAKTKPREEQYGSTYRVVSVLTVLHQDWLNGKEYKCKVSNKALPAPIEKTISKAKGQPREPQVYTLPPSRDELTKNQVSLWCLVKGFYPSDIAVEWESNGQPENNYKTTPPVLDSDGSFFLYSKLTVDKSRWQQGNVFSCSVMHEALHNHYTQKSLSLSPG

SEQ ID NO: 220 - protein, 452 aa, artificial
  Synthetic polypeptide
ELQLQESGPGLVKPSETLSLTCTVSGGSISESSYYWGWIRQPPGKGLEWIGSIYYTGNTYYLPSLKSRVTISVDTSKNQFSLKLSSVTAADTAVYYCARVRYGVGVPRYFDPWGQGTLVTVSSASTKGPSVFPLAPSSKSTSGGTAALGCLVKDYFPEPVTVSWNSGALTSGVHTFPAVLQSSGLYSLSSVVTVPSSSLGTQTYICNVNHKPSNTKVDKKVEPKSCDKTHTCPPCPAPELLGGPSVFLFPPKPKDTLMISRTPEVTCVVVDVSHEDPEVKFNWYVDGVEVHNAKTKPREEQYGSTYRVVSVLTVLHQDWLNGKEYKCKVSNKALPAPIEKTISKAKGQPREPQVYTLPPSRDELTKNQVSLSCAVKGFYPSDIAVEWESNGQPENNYKTTPPVLDSDGSFFLVSKLTVDKSRWQQGNVFSCSVMHEALHNHYTQKSLSLSPG

SEQ ID NO: 221 - protein, 452 aa, artificial
  Synthetic polypeptide
ELQLQESGPGLVKPSETLSLTCTVSGGSISTSSYHWGWIRQPPGKGLEWIGSIYYTGNTYYMPSLKSRVTISVDTSKNQFSLKLSSVTAADTAVYYCVRVRYGVGVPRYFDPWGQGTLVTVSSASTKGPSVFPLAPSSKSTSGGTAALGCLVKDYFPEPVTVSWNSGALTSGVHTFPAVLQSSGLYSLSSVVTVPSSSLGTQTYICNVNHKPSNTKVDKKVEPKSCDKTHTCPPCPAPELLGGPSVFLFPPKPKDTLMISRTPEVTCVVVDVSHEDPEVKFNWYVDGVEVHNAKTKPREEQYGSTYRVVSVLTVLHQDWLNGKEYKCKVSNKALPAPIEKTISKAKGQPREPQVYTLPPSRDELTKNQVSLTCLVKGFYPSDIAVEWESNGQPENNYKTTPPVLDSDGSFFLYSKLTVDKSRWQQGNVFSCSVMHEALHNHYTQKSLSLSPG

SEQ ID NO: 222 - protein, 452 aa, artificial
  Synthetic polypeptide
ELQLQESGPGLVKPSETLSLTCTVSGGSISTSSYHWGWIRQPPGKGLEWIGSIYYTGNTYYMPSLKSRVTISVDTSKNQFSLKLSSVTAADTAVYYCVRVRYGVGVPRYFDPWGQGTLVTVSSASTKGPSVFPLAPSSKSTSGGTAALGCLVKDYFPEPVTVSWNSGALTSGVHTFPAVLQSSGLYSLSSVVTVPSSSLGTQTYICNVNHKPSNTKVDKKVEPKSCDKTHTCPPCPAPELLGGPSVFLFPPKPKDTLMISRTPEVTCVVVDVSHEDPEVKFNWYVDGVEVHNAKTKPREEQYGSTYRVVSVLTVLHQDWLNGKEYKCKVSNKALPAPIEKTISKAKGQPREPQVYTLPPSRDELTKNQVSLWCLVKGFYPSDIAVEWESNGQPENNYKTTPPVLDSDGSFFLYSKLTVDKSRWQQGNVFSCSVMHEALHNHYTQKSLSLSPG

SEQ ID NO: 223 - protein, 452 aa, artificial
  Synthetic polypeptide
ELQLQESGPGLVKPSETLSLTCTVSGGSISTSSYHWGWIRQPPGKGLEWIGSIYYTGNTYYMPSLKSRVTISVDTSKNQFSLKLSSVTAADTAVYYCVRVRYGVGVPRYFDPWGQGTLVTVSSASTKGPSVFPLAPSSKSTSGGTAALGCLVKDYFPEPVTVSWNSGALTSGVHTFPAVLQSSGLYSLSSVVTVPSSSLGTQTYICNVNHKPSNTKVDKKVEPKSCDKTHTCPPCPAPELLGGPSVFLFPPKPKDTLMISRTPEVTCVVVDVSHEDPEVKFNWYVDGVEVHNAKTKPREEQYGSTYRVVSVLTVLHQDWLNGKEYKCKVSNKALPAPIEKTISKAKGQPREPQVYTLPPSRDELTKNQVSLSCAVKGFYPSDIAVEWESNGQPENNYKTTPPVLDSDGSFFLVSKLTVDKSRWQQGNVFSCSVMHEALHNHYTQKSLSLSPG

SEQ ID NO: 224 - protein, 452 aa, artificial
  Synthetic polypeptide
ELQLQESGPGLVKPSETLSLTCTVSGGSISRSSYYWGWIRQPPGKGLEWIGSIYYTGNTYYWPSLKSRVTISVDTSKNQFSLKLSSVTAADTAVYYCTRVRYGVGVPRYFDPWGQGTLVTVSSASTKGPSVFPLAPSSKSTSGGTAALGCLVKDYFPEPVTVSWNSGALTSGVHTFPAVLQSSGLYSLSSVVTVPSSSLGTQTYICNVNHKPSNTKVDKKVEPKSCDKTHTCPPCPAPELLGGPSVFLFPPKPKDTLMISRTPEVTCVVVDVSHEDPEVKFNWYVDGVEVHNAKTKPREEQYGSTYRVVSVLTVLHQDWLNGKEYKCKVSNKALPAPIEKTISKAKGQPREPQVYTLPPSRDELTKNQVSLTCLVKGFYPSDIAVEWESNGQPENNYKTTPPVLDSDGSFFLYSKLTVDKSRWQQGNVFSCSVMHEALHNHYTQKSLSLSPG

SEQ ID NO: 225 - protein, 452 aa, artificial
  Synthetic polypeptide
ELQLQESGPGLVKPSETLSLTCTVSGGSISRSSYYWGWIRQPPGKGLEWIGSIYYTGNTYYWPSLKSRVTISVDTSKNQFSLKLSSVTAADTAVYYCTRVRYGVGVPRYFDPWGQGTLVTVSSASTKGPSVFPLAPSSKSTSGGTAALGCLVKDYFPEPVTVSWNSGALTSGVHTFPAVLQSSGLYSLSSVVTVPSSSLGTQTYICNVNHKPSNTKVDKKVEPKSCDKTHTCPPCPAPELLGGPSVFLFPPKPKDTLMISRTPEVTCVVVDVSHEDPEVKFNWYVDGVEVHNAKTKPREEQYGSTYRVVSVLTVLHQDWLNGKEYKCKVSNKALPAPIEKTISKAKGQPREPQVYTLPPSRDELTKNQVSLWCLVKGFYPSDIAVEWESNGQPENNYKTTPPVLDSDGSFFLYSKLTVDKSRWQQGNVFSCSVMHEALHNHYTQKSLSLSPG

SEQ ID NO: 226 - protein, 452 aa, artificial
  Synthetic polypeptide
ELQLQESGPGLVKPSETLSLTCTVSGGSISRSSYYWGWIRQPPGKGLEWIGSIYYTGNTYYWPSLKSRVTISVDTSKNQFSLKLSSVTAADTAVYYCTRVRYGVGVPRYFDPWGQGTLVTVSSASTKGPSVFPLAPSSKSTSGGTAALGCLVKDYFPEPVTVSWNSGALTSGVHTFPAVLQSSGLYSLSSVVTVPSSSLGTQTYICNVNHKPSNTKVDKKVEPKSCDKTHTCPPCPAPELLGGPSVFLFPPKPKDTLMISRTPEVTCVVVDVSHEDPEVKFNWYVDGVEVHNAKTKPREEQYGSTYRVVSVLTVLHQDWLNGKEYKCKVSNKALPAPIEKTISKAKGQPREPQVYTLPPSRDELTKNQVSLSCAVKGFYPSDIAVEWESNGQPENNYKTTPPVLDSDGSFFLVSKLTVDKSRWQQGNVFSCSVMHEALHNHYTQKSLSLSPG

SEQ ID NO: 227 - protein, 452 aa, artificial
  Synthetic polypeptide
ELQLQESGPGLVKPSETLSLTCTVSGGSISDSSYYWGWIRQPPGKGLEWIGSIYYTGETYYAPSLKSRVTISVDTSKNQFSLKLSSVTAADTAVYYCARLRYGVGVPRYFDPWGQGTLVTVSSASTKGPSVFPLAPSSKSTSGGTAALGCLVKDYFPEPVTVSWNSGALTSGVHTFPAVLQSSGLYSLSSVVTVPSSSLGTQTYICNVNHKPSNTKVDKKVEPKSCDKTHTCPPCPAPELLGGPSVFLFPPKPKDTLMISRTPEVTCVVVDVSHEDPEVKFNWYVDGVEVHNAKTKPREEQYGSTYRVVSVLTVLHQDWLNGKEYKCKVSNKALPAPIEKTISKAKGQPREPQVYTLPPSRDELTKNQVSLTCLVKGFYPSDIAVEWESNGQPENNYKTTPPVLDSDGSFFLYSKLTVDKSRWQQGNVFSCSVMHEALHNHYTQKSLSLSPG

SEQ ID NO: 228 - protein, 452 aa, artificial
  Synthetic polypeptide
ELQLQESGPGLVKPSETLSLTCTVSGGSISDSSYYWGWIRQPPGKGLEWIGSIYYTGETYYAPSLKSRVTISVDTSKNQFSLKLSSVTAADTAVYYCARLRYGVGVPRYFDPWGQGTLVTVSSASTKGPSVFPLAPSSKSTSGGTAALGCLVKDYFPEPVTVSWNSGALTSGVHTFPAVLQSSGLYSLSSVVTVPSSSLGTQTYICNVNHKPSNTKVDKKVEPKSCDKTHTCPPCPAPELLGGPSVFLFPPKPKDTLMISRTPEVTCVVVDVSHEDPEVKFNWYVDGVEVHNAKTKPREEQYGSTYRVVSVLTVLHQDWLNGKEYKCKVSNKALPAPIEKTISKAKGQPREPQVYTLPPSRDELTKNQVSLWCLVKGFYPSDIAVEWESNGQPENNYKTTPPVLDSDGSFFLYSKLTVDKSRWQQGNVFSCSVMHEALHNHYTQKSLSLSPG

SEQ ID NO: 229 - protein, 452 aa, artificial
  Synthetic polypeptide
ELQLQESGPGLVKPSETLSLTCTVSGGSISDSSYYWGWIRQPPGKGLEWIGSIYYTGETYYAPSLKSRVTISVDTSKNQFSLKLSSVTAADTAVYYCARLRYGVGVPRYFDPWGQGTLVTVSSASTKGPSVFPLAPSSKSTSGGTAALGCLVKDYFPEPVTVSWNSGALTSGVHTFPAVLQSSGLYSLSSVVTVPSSSLGTQTYICNVNHKPSNTKVDKKVEPKSCDKTHTCPPCPAPELLGGPSVFLFPPKPKDTLMISRTPEVTCVVVDVSHEDPEVKFNWYVDGVEVHNAKTKPREEQYGSTYRVVSVLTVLHQDWLNGKEYKCKVSNKALPAPIEKTISKAKGQPREPQVYTLPPSRDELTKNQVSLSCAVKGFYPSDIAVEWESNGQPENNYKTTPPVLDSDGSFFLVSKLTVDKSRWQQGNVFSCSVMHEALHNHYTQKSLSLSPG

SEQ ID NO: 230 - protein, 452 aa, artificial
  Synthetic polypeptide
ELQLQESGPGLVKPSETLSLTCTVSGGSISDSSYYWGWIRQPPGKGLEWIGSIYYTGETYYAPSLKSRVTISVDTSKNQFSLKLSSVTAADTAVYYCARVKYGVGVPRYFDPWGQGTLVTVSSASTKGPSVFPLAPSSKSTSGGTAALGCLVKDYFPEPVTVSWNSGALTSGVHTFPAVLQSSGLYSLSSVVTVPSSSLGTQTYICNVNHKPSNTKVDKKVEPKSCDKTHTCPPCPAPELLGGPSVFLFPPKPKDTLMISRTPEVTCVVVDVSHEDPEVKFNWYVDGVEVHNAKTKPREEQYGSTYRVVSVLTVLHQDWLNGKEYKCKVSNKALPAPIEKTISKAKGQPREPQVYTLPPSRDELTKNQVSLTCLVKGFYPSDIAVEWESNGQPENNYKTTPPVLDSDGSFFLYSKLTVDKSRWQQGNVFSCSVMHEALHNHYTQKSLSLSPG

SEQ ID NO: 231 - protein, 452 aa, artificial
  Synthetic polypeptide
ELQLQESGPGLVKPSETLSLTCTVSGGSISDSSYYWGWIRQPPGKGLEWIGSIYYTGETYYAPSLKSRVTISVDTSKNQFSLKLSSVTAADTAVYYCARVKYGVGVPRYFDPWGQGTLVTVSSASTKGPSVFPLAPSSKSTSGGTAALGCLVKDYFPEPVTVSWNSGALTSGVHTFPAVLQSSGLYSLSSVVTVPSSSLGTQTYICNVNHKPSNTKVDKKVEPKSCDKTHTCPPCPAPELLGGPSVFLFPPKPKDTLMISRTPEVTCVVVDVSHEDPEVKFNWYVDGVEVHNAKTKPREEQYGSTYRVVSVLTVLHQDWLNGKEYKCKVSNKALPAPIEKTISKAKGQPREPQVYTLPPSRDELTKNQVSLWCLVKGFYPSDIAVEWESNGQPENNYKTTPPVLDSDGSFFLYSKLTVDKSRWQQGNVFSCSVMHEALHNHYTQKSLSLSPG

SEQ ID NO: 232 - protein, 452 aa, artificial
  Synthetic polypeptide
ELQLQESGPGLVKPSETLSLTCTVSGGSISDSSYYWGWIRQPPGKGLEWIGSIYYTGETYYAPSLKSRVTISVDTSKNQFSLKLSSVTAADTAVYYCARVKYGVGVPRYFDPWGQGTLVTVSSASTKGPSVFPLAPSSKSTSGGTAALGCLVKDYFPEPVTVSWNSGALTSGVHTFPAVLQSSGLYSLSSVVTVPSSSLGTQTYICNVNHKPSNTKVDKKVEPKSCDKTHTCPPCPAPELLGGPSVFLFPPKPKDTLMISRTPEVTCVVVDVSHEDPEVKFNWYVDGVEVHNAKTKPREEQYGSTYRVVSVLTVLHQDWLNGKEYKCKVSNKALPAPIEKTISKAKGQPREPQVYTLPPSRDELTKNQVSLSCAVKGFYPSDIAVEWESNGQPENNYKTTPPVLDSDGSFFLVSKLTVDKSRWQQGNVFSCSVMHEALHNHYTQKSLSLSPG

SEQ ID NO: 233 - protein, 452 aa, artificial
  Synthetic polypeptide
ELQLQESGPGLVKPSETLSLTCTVSGGSISDSSYYWGWIRQPPGKGLEWIGSIYYTGETYYAPSLKSRVTISVDTSKNQFSLKLSSVTAADTAVYYCARVRYGVGVPRHFDPWGQGTLVTVSSASTKGPSVFPLAPSSKSTSGGTAALGCLVKDYFPEPVTVSWNSGALTSGVHTFPAVLQSSGLYSLSSVVTVPSSSLGTQTYICNVNHKPSNTKVDKKVEPKSCDKTHTCPPCPAPELLGGPSVFLFPPKPKDTLMISRTPEVTCVVVDVSHEDPEVKFNWYVDGVEVHNAKTKPREEQYGSTYRVVSVLTVLHQDWLNGKEYKCKVSNKALPAPIEKTISKAKGQPREPQVYTLPPSRDELTKNQVSLTCLVKGFYPSDIAVEWESNGQPENNYKTTPPVLDSDGSFFLYSKLTVDKSRWQQGNVFSCSVMHEALHNHYTQKSLSLSPG

SEQ ID NO: 234 - protein, 452 aa, artificial
  Synthetic polypeptide
ELQLQESGPGLVKPSETLSLTCTVSGGSISDSSYYWGWIRQPPGKGLEWIGSIYYTGETYYAPSLKSRVTISVDTSKNQFSLKLSSVTAADTAVYYCARVRYGVGVPRHFDPWGQGTLVTVSSASTKGPSVFPLAPSSKSTSGGTAALGCLVKDYFPEPVTVSWNSGALTSGVHTFPAVLQSSGLYSLSSVVTVPSSSLGTQTYICNVNHKPSNTKVDKKVEPKSCDKTHTCPPCPAPELLGGPSVFLFPPKPKDTLMISRTPEVTCVVVDVSHEDPEVKFNWYVDGVEVHNAKTKPREEQYGSTYRVVSVLTVLHQDWLNGKEYKCKVSNKALPAPIEKTISKAKGQPREPQVYTLPPSRDELTKNQVSLWCLVKGFYPSDIAVEWESNGQPENNYKTTPPVLDSDGSFFLYSKLTVDKSRWQQGNVFSCSVMHEALHNHYTQKSLSLSPG

SEQ ID NO: 235 - protein, 452 aa, artificial
  Synthetic polypeptide
ELQLQESGPGLVKPSETLSLTCTVSGGSISDSSYYWGWIRQPPGKGLEWIGSIYYTGETYYAPSLKSRVTISVDTSKNQFSLKLSSVTAADTAVYYCARVRYGVGVPRHFDPWGQGTLVTVSSASTKGPSVFPLAPSSKSTSGGTAALGCLVKDYFPEPVTVSWNSGALTSGVHTFPAVLQSSGLYSLSSVVTVPSSSLGTQTYICNVNHKPSNTKVDKKVEPKSCDKTHTCPPCPAPELLGGPSVFLFPPKPKDTLMISRTPEVTCVVVDVSHEDPEVKFNWYVDGVEVHNAKTKPREEQYGSTYRVVSVLTVLHQDWLNGKEYKCKVSNKALPAPIEKTISKAKGQPREPQVYTLPPSRDELTKNQVSLSCAVKGFYPSDIAVEWESNGQPENNYKTTPPVLDSDGSFFLVSKLTVDKSRWQQGNVFSCSVMHEALHNHYTQKSLSLSPG

SEQ ID NO: 236 - protein, 452 aa, artificial
  Synthetic polypeptide
ELQLQESGPGLVKPSETLSLTCTVSGGSISESSYYWGWIRQPPGKGLEWIGSIYYTGETYYAPSLKSRVTISVDTSKNQFSLKLSSVTAADTAVYYCARLRYGVGVPRYFDPWGQGTLVTVSSASTKGPSVFPLAPSSKSTSGGTAALGCLVKDYFPEPVTVSWNSGALTSGVHTFPAVLQSSGLYSLSSVVTVPSSSLGTQTYICNVNHKPSNTKVDKKVEPKSCDKTHTCPPCPAPELLGGPSVFLFPPKPKDTLMISRTPEVTCVVVDVSHEDPEVKFNWYVDGVEVHNAKTKPREEQYGSTYRVVSVLTVLHQDWLNGKEYKCKVSNKALPAPIEKTISKAKGQPREPQVYTLPPSRDELTKNQVSLTCLVKGFYPSDIAVEWESNGQPENNYKTTPPVLDSDGSFFLYSKLTVDKSRWQQGNVFSCSVMHEALHNHYTQKSLSLSPG

SEQ ID NO: 237 - protein, 452 aa, artificial
  Synthetic polypeptide
ELQLQESGPGLVKPSETLSLTCTVSGGSISESSYYWGWIRQPPGKGLEWIGSIYYTGETYYAPSLKSRVTISVDTSKNQFSLKLSSVTAADTAVYYCARLRYGVGVPRYFDPWGQGTLVTVSSASTKGPSVFPLAPSSKSTSGGTAALGCLVKDYFPEPVTVSWNSGALTSGVHTFPAVLQSSGLYSLSSVVTVPSSSLGTQTYICNVNHKPSNTKVDKKVEPKSCDKTHTCPPCPAPELLGGPSVFLFPPKPKDTLMISRTPEVTCVVVDVSHEDPEVKFNWYVDGVEVHNAKTKPREEQYGSTYRVVSVLTVLHQDWLNGKEYKCKVSNKALPAPIEKTISKAKGQPREPQVYTLPPSRDELTKNQVSLWCLVKGFYPSDIAVEWESNGQPENNYKTTPPVLDSDGSFFLYSKLTVDKSRWQQGNVFSCSVMHEALHNHYTQKSLSLSPG

SEQ ID NO: 238 - protein, 452 aa, artificial
  Synthetic polypeptide
ELQLQESGPGLVKPSETLSLTCTVSGGSISESSYYWGWIRQPPGKGLEWIGSIYYTGETYYAPSLKSRVTISVDTSKNQFSLKLSSVTAADTAVYYCARLRYGVGVPRYFDPWGQGTLVTVSSASTKGPSVFPLAPSSKSTSGGTAALGCLVKDYFPEPVTVSWNSGALTSGVHTFPAVLQSSGLYSLSSVVTVPSSSLGTQTYICNVNHKPSNTKVDKKVEPKSCDKTHTCPPCPAPELLGGPSVFLFPPKPKDTLMISRTPEVTCVVVDVSHEDPEVKFNWYVDGVEVHNAKTKPREEQYGSTYRVVSVLTVLHQDWLNGKEYKCKVSNKALPAPIEKTISKAKGQPREPQVYTLPPSRDELTKNQVSLSCAVKGFYPSDIAVEWESNGQPENNYKTTPPVLDSDGSFFLVSKLTVDKSRWQQGNVFSCSVMHEALHNHYTQKSLSLSPG

SEQ ID NO: 239 - protein, 452 aa, artificial
  Synthetic polypeptide
ELQLQESGPGLVKPSETLSLTCTVSGGSISESSYYWGWIRQPPGKGLEWIGSIYYTGETYYAPSLKSRVTISVDTSKNQFSLKLSSVTAADTAVYYCARVKYGVGVPRYFDPWGQGTLVTVSSASTKGPSVFPLAPSSKSTSGGTAALGCLVKDYFPEPVTVSWNSGALTSGVHTFPAVLQSSGLYSLSSVVTVPSSSLGTQTYICNVNHKPSNTKVDKKVEPKSCDKTHTCPPCPAPELLGGPSVFLFPPKPKDTLMISRTPEVTCVVVDVSHEDPEVKFNWYVDGVEVHNAKTKPREEQYGSTYRVVSVLTVLHQDWLNGKEYKCKVSNKALPAPIEKTISKAKGQPREPQVYTLPPSRDELTKNQVSLTCLVKGFYPSDIAVEWESNGQPENNYKTTPPVLDSDGSFFLYSKLTVDKSRWQQGNVFSCSVMHEALHNHYTQKSLSLSPG

SEQ ID NO: 240 - protein, 452 aa, artificial
  Synthetic polypeptide
ELQLQESGPGLVKPSETLSLTCTVSGGSISESSYYWGWIRQPPGKGLEWIGSIYYTGETYYAPSLKSRVTISVDTSKNQFSLKLSSVTAADTAVYYCARVKYGVGVPRYFDPWGQGTLVTVSSASTKGPSVFPLAPSSKSTSGGTAALGCLVKDYFPEPVTVSWNSGALTSGVHTFPAVLQSSGLYSLSSVVTVPSSSLGTQTYICNVNHKPSNTKVDKKVEPKSCDKTHTCPPCPAPELLGGPSVFLFPPKPKDTLMISRTPEVTCVVVDVSHEDPEVKFNWYVDGVEVHNAKTKPREEQYGSTYRVVSVLTVLHQDWLNGKEYKCKVSNKALPAPIEKTISKAKGQPREPQVYTLPPSRDELTKNQVSLWCLVKGFYPSDIAVEWESNGQPENNYKTTPPVLDSDGSFFLYSKLTVDKSRWQQGNVFSCSVMHEALHNHYTQKSLSLSPG

SEQ ID NO: 241 - protein, 452 aa, artificial
  Synthetic polypeptide
ELQLQESGPGLVKPSETLSLTCTVSGGSISESSYYWGWIRQPPGKGLEWIGSIYYTGETYYAPSLKSRVTISVDTSKNQFSLKLSSVTAADTAVYYCARVKYGVGVPRYFDPWGQGTLVTVSSASTKGPSVFPLAPSSKSTSGGTAALGCLVKDYFPEPVTVSWNSGALTSGVHTFPAVLQSSGLYSLSSVVTVPSSSLGTQTYICNVNHKPSNTKVDKKVEPKSCDKTHTCPPCPAPELLGGPSVFLFPPKPKDTLMISRTPEVTCVVVDVSHEDPEVKFNWYVDGVEVHNAKTKPREEQYGSTYRVVSVLTVLHQDWLNGKEYKCKVSNKALPAPIEKTISKAKGQPREPQVYTLPPSRDELTKNQVSLSCAVKGFYPSDIAVEWESNGQPENNYKTTPPVLDSDGSFFLVSKLTVDKSRWQQGNVFSCSVMHEALHNHYTQKSLSLSPG

SEQ ID NO: 242 - protein, 217 aa, artificial
  Synthetic polypeptide
ESVLTQPPSVSGAPGQRVTISCTGSSSNIGAGYDVHWYQQLPGTAPKLLIYGNTNRPSGVPDRFSGSKSGTSASLAITGLQAEDEADYYCQSYDISLSGWVFGGGTKLTVLGQPKAAPSVTLFPPSSEELQANKATLVCLISDFYPGAVTVAWKADSSPVKAGVETTTPSKQSNNKYAASSYLSLTPEQWKSHKSYSCQVTHEGSTVEKTVAPTECS

SEQ ID NO: 243 - protein, 452 aa, artificial
  Synthetic polypeptide
QLQLQESGPGLVKPSETLSLTCTVSGGSISTSSYYWGWIRQPPGKGLEWIGSIYYTGNTYYNPSLKSRVTISVDTSKNQFSLKLSSVTAADTAVYYCARVRYGVGVPRYFDPWGQGTLVTVSSASTKGPSVFPLAPSSKSTSGGTAALGCLVKDYFPEPVTVSWNSGALTSGVHTFPAVLQSSGLYSLSSVVTVPSSSLGTQTYICNVNHKPSNTKVDKKVEPKSCDKTHTCPPCPAPELLGGPSVFLFPPKPKDTLMISRTPEVTCVVVDVSHEDPEVKFNWYVDGVEVHNAKTKPREEQYGSTYRVVSVLTVLHQDWLNGKEYKCKVSNKALPAPIEKTISKAKGQPREPQVYTLPPSRDELTKNQVSLTCLVKGFYPSDIAVEWESNGQPENNYKTTPPVLDSDGSFFLYSKLTVDKSRWQQGNVFSCSVMHEALHNHYTQKSLSLSPG

SEQ ID NO: 244 - protein, 452 aa, artificial
  Synthetic polypeptide
QLQLQESGPGLVKPSETLSLTCTVSGGSISTSSYYWGWIRQPPGKGLEWIGSIYYTGNTYYNPSLKSRVTISVDTSKNQFSLKLSSVTAADTAVYYCARVRYGVGVPRYFDPWGQGTLVTVSSASTKGPSVFPLAPSSKSTSGGTAALGCLVKDYFPEPVTVSWNSGALTSGVHTFPAVLQSSGLYSLSSVVTVPSSSLGTQTYICNVNHKPSNTKVDKKVEPKSCDKTHTCPPCPAPELLGGPSVFLFPPKPKDTLMISRTPEVTCVVVDVSHEDPEVKFNWYVDGVEVHNAKTKPREEQYGSTYRVVSVLTVLHQDWLNGKEYKCKVSNKALPAPIEKTISKAKGQPREPQVYTLPPSRDELTKNQVSLWCLVKGFYPSDIAVEWESNGQPENNYKTTPPVLDSDGSFFLYSKLTVDKSRWQQGNVFSCSVMHEALHNHYTQKSLSLSPG

SEQ ID NO: 245 - protein, 452 aa, artificial
  Synthetic polypeptide
QLQLQESGPGLVKPSETLSLTCTVSGGSISTSSYYWGWIRQPPGKGLEWIGSIYYTGNTYYNPSLKSRVTISVDTSKNQFSLKLSSVTAADTAVYYCARVRYGVGVPRYFDPWGQGTLVTVSSASTKGPSVFPLAPSSKSTSGGTAALGCLVKDYFPEPVTVSWNSGALTSGVHTFPAVLQSSGLYSLSSVVTVPSSSLGTQTYICNVNHKPSNTKVDKKVEPKSCDKTHTCPPCPAPELLGGPSVFLFPPKPKDTLMISRTPEVTCVVVDVSHEDPEVKFNWYVDGVEVHNAKTKPREEQYGSTYRVVSVLTVLHQDWLNGKEYKCKVSNKALPAPIEKTISKAKGQPREPQVYTLPPSRDELTKNQVSLSCAVKGFYPSDIAVEWESNGQPENNYKTTPPVLDSDGSFFLVSKLTVDKSRWQQGNVFSCSVMHEALHNHYTQKSLSLSPG

SEQ ID NO: 246 - protein, 217 aa, artificial
  Synthetic polypeptide
QSVLTQPPSVSGAPGQRVTISCTGSSSNIGAHYDVHWYQQLPGTAPKLLIYGNDNRPSGVPDRFSGSKSGTSASLAITGLQAEDEADYYCQSYDYSLSGYVFGGGTKLTVLGQPKAAPSVTLFPPSSEELQANKATLVCLISDFYPGAVTVAWKADSSPVKAGVETTTPSKQSNNKYAASSYLSLTPEQWKSHKSYSCQVTHEGSTVEKTVAPTECS

SEQ ID NO: 247 - protein, 218 aa, artificial
  Synthetic polypeptide
QESVLTQPPSVSGAPGQRVTISCTGSSSNIGAGYDVHWYQQLPGTAPKLLIYGNTNRPSGVPDRFSGSKSGTSASLAITGLQAEDEADYYCQSYDISLSGWVFGGGTKLTVLGQPKAAPSVTLFPPSSEELQANKATLVCLISDFYPGAVTVAWKADSSPVKAGVETTTPSKQSNNKYAASSYLSLTPEQWKSHKSYSCQVTHEGSTVEKTVAPTECS

SEQ ID NO: 248 - protein, 451 aa, artificial
  Synthetic polypeptide
QLQLQESGPGLVKPSETLSLTCTVSGGSITSSNYYWGWIRQPPGKGLEWIGSIDYTGSTYYNPSLKSRVTISVDTSKNQFSLKLSSVTAADTAVYYCARGKYYETYLGFDVWGQGTLVTVSSASTKGPSVFPLAPSSKSTSGGTAALGCLVKDYFPEPVTVSWNSGALTSGVHTFPAVLQSSGLYSLSSVVTVPSSSLGTQTYICNVNHKPSNTKVDKKVEPKSCDKTHTCPPCPAPELLGGPSVFLFPPKPKDTLMISRTPEVTCVVVDVSHEDPEVKFNWYVDGVEVHNAKTKPREEQYGSTYRVVSVLTVLHQDWLNGKEYKCKVSNKALPAPIEKTISKAKGQPREPQVYTLPPSRDELTKNQVSLTCLVKGFYPSDIAVEWESNGQPENNYKTTPPVLDSDGSFFLYSKLTVDKSRWQQGNVFSCSVMHEALHNHYTQKSLSLSPG

SEQ ID NO: 249 - protein, 451 aa, artificial
  Synthetic polypeptide
QLQLQESGPGLVKPSETLSLTCTVSGGSITSSNYYWGWIRQPPGKGLEWIGSIDYTGSTYYNPSLKSRVTISVDTSKNQFSLKLSSVTAADTAVYYCARGKYYETYLGFDVWGQGTLVTVSSASTKGPSVFPLAPSSKSTSGGTAALGCLVKDYFPEPVTVSWNSGALTSGVHTFPAVLQSSGLYSLSSVVTVPSSSLGTQTYICNVNHKPSNTKVDKKVEPKSCDKTHTCPPCPAPELLGGPSVFLFPPKPKDTLMISRTPEVTCVVVDVSHEDPEVKFNWYVDGVEVHNAKTKPREEQYGSTYRVVSVLTVLHQDWLNGKEYKCKVSNKALPAPIEKTISKAKGQPREPQVYTLPPSRDELTKNQVSLWCLVKGFYPSDIAVEWESNGQPENNYKTTPPVLDSDGSFFLYSKLTVDKSRWQQGNVFSCSVMHEALHNHYTQKSLSLSPG

SEQ ID NO: 250 - protein, 451 aa, artificial
  Synthetic polypeptide
QLQLQESGPGLVKPSETLSLTCTVSGGSITSSNYYWGWIRQPPGKGLEWIGSIDYTGSTYYNPSLKSRVTISVDTSKNQFSLKLSSVTAADTAVYYCARGKYYETYLGFDVWGQGTLVTVSSASTKGPSVFPLAPSSKSTSGGTAALGCLVKDYFPEPVTVSWNSGALTSGVHTFPAVLQSSGLYSLSSVVTVPSSSLGTQTYICNVNHKPSNTKVDKKVEPKSCDKTHTCPPCPAPELLGGPSVFLFPPKPKDTLMISRTPEVTCVVVDVSHEDPEVKFNWYVDGVEVHNAKTKPREEQYGSTYRVVSVLTVLHQDWLNGKEYKCKVSNKALPAPIEKTISKAKGQPREPQVYTLPPSRDELTKNQVSLSCAVKGFYPSDIAVEWESNGQPENNYKTTPPVLDSDGSFFLVSKLTVDKSRWQQGNVFSCSVMHEALHNHYTQKSLSLSPG

SEQ ID NO: 251 - protein, 7 aa, artificial
  Synthetic polypeptide
  VARIANT (1)..(1): X at 1 is T, D, E, or N.
  VARIANT (2)..(2): X at 2 is S, A, E, G, K, Q, R, or T.
  VARIANT (3)..(3): X at 3 is S, A, D, E, G, N, P, Q, or T.
  VARIANT (5)..(5): X at 5 is Y, A, E, G, H, M, N, Q, S, T, or V.
  VARIANT (7)..(7): X at 7 is W, F, I, V, or Y.
XXXNXYX

SEQ ID NO: 252 - protein, 7 aa, artificial
  Synthetic polypeptide
DSSNYYW

SEQ ID NO: 253 - protein, 7 aa, artificial
  Synthetic polypeptide
ESSNYYW

SEQ ID NO: 254 - protein, 7 aa, artificial
  Synthetic polypeptide
NSSNYYW

SEQ ID NO: 255 - protein, 7 aa, artificial
  Synthetic polypeptide
TASNYYW

SEQ ID NO: 256 - protein, 7 aa, artificial
  Synthetic polypeptide
TESNYYW

SEQ ID NO: 257 - protein, 7 aa, artificial
  Synthetic polypeptide
TGSNYYW

SEQ ID NO: 258 - protein, 7 aa, artificial
  Synthetic polypeptide
TKSNYYW

SEQ ID NO: 259 - protein, 7 aa, artificial
  Synthetic polypeptide
TQSNYYW

SEQ ID NO: 260 - protein, 7 aa, artificial
  Synthetic polypeptide
TRSNYYW

SEQ ID NO: 261 - protein, 7 aa, artificial
  Synthetic polypeptide
TTSNYYW

SEQ ID NO: 262 - protein, 7 aa, artificial
  Synthetic polypeptide
TSANYYW

SEQ ID NO: 263 - protein, 7 aa, artificial
  Synthetic polypeptide
TSDNYYW

SEQ ID NO: 264 - protein, 7 aa, artificial
  Synthetic polypeptide
TSENYYW

SEQ ID NO: 265 - protein, 7 aa, artificial
  Synthetic polypeptide
TSGNYYW

SEQ ID NO: 266 - protein, 7 aa, artificial
  Synthetic polypeptide
TSNNYYW

SEQ ID NO: 267 - protein, 7 aa, artificial
  Synthetic polypeptide
TSPNYYW

SEQ ID NO: 268 - protein, 7 aa, artificial
  Synthetic polypeptide
TSQNYYW

SEQ ID NO: 269 - protein, 7 aa, artificial
  Synthetic polypeptide
TSTNYYW

SEQ ID NO: 270 - protein, 7 aa, artificial
  Synthetic polypeptide
TSSNAYW

SEQ ID NO: 271 - protein, 7 aa, artificial
  Synthetic polypeptide
TSSNEYW

SEQ ID NO: 272 - protein, 7 aa, artificial
  Synthetic polypeptide
TSSNGYW

SEQ ID NO: 273 - protein, 7 aa, artificial
  Synthetic polypeptide
TSSNHYW

SEQ ID NO: 274 - protein, 7 aa, artificial
  Synthetic polypeptide
TSSNMYW

SEQ ID NO: 275 - protein, 7 aa, artificial
  Synthetic polypeptide
TSSNNYW

SEQ ID NO: 276 - protein, 7 aa, artificial
  Synthetic polypeptide
TSSNQYW

SEQ ID NO: 277 - protein, 7 aa, artificial
  Synthetic polypeptide
TSSNSYW

SEQ ID NO: 278 - protein, 7 aa, artificial
  Synthetic polypeptide
TSSNTYW

SEQ ID NO: 279 - protein, 7 aa, artificial
  Synthetic polypeptide
TSSNVYW

SEQ ID NO: 280 - protein, 7 aa, artificial
  Synthetic polypeptide
TSSNYYF

SEQ ID NO: 281 - protein, 7 aa, artificial
  Synthetic polypeptide
TSSNYYI

SEQ ID NO: 282 - protein, 7 aa, artificial
  Synthetic polypeptide
TSSNYYV

SEQ ID NO: 283 - protein, 7 aa, artificial
  Synthetic polypeptide
TSSNYYY

SEQ ID NO: 284 - protein, 12 aa, artificial
  Synthetic polypeptide
  VARIANT (1)..(1): X at 1 is S, N, or T.
  VARIANT (2)..(2): X at 2 is I, M, or V.
  VARIANT (4)..(4): X at 4 is Y, or H.
  VARIANT (5)..(5): X at 5 is T, H, L, or N.
  VARIANT (6)..(6): X at 6 is G, A, D, E, H, K, N, Q, R, S, or T.
  VARIANT (7)..(7): X at 7 is S, A, D, Q, or T.
  VARIANT (8)..(8): X at 8 is T, A, D, or E.
  VARIANT (9)..(9): X at 9 is Y, A, F, Q, S, or W.
  VARIANT (11)..(11): X at 11 is N, D, E, H, P, or Q.
  VARIANT (12)..(12): X at 12 is P, A, or E.
XXDXXXXXXYXX

SEQ ID NO: 285 - protein, 12 aa, artificial
  Synthetic polypeptide
NIDYTGSTYYNP

SEQ ID NO: 286 - protein, 12 aa, artificial
  Synthetic polypeptide
TIDYTGSTYYNP

SEQ ID NO: 287 - protein, 12 aa, artificial
  Synthetic polypeptide
SMDYTGSTYYNP

SEQ ID NO: 288 - protein, 12 aa, artificial
  Synthetic polypeptide
SVDYTGSTYYNP

SEQ ID NO: 289 - protein, 12 aa, artificial
  Synthetic polypeptide
SIDHTGSTYYNP

SEQ ID NO: 290 - protein, 12 aa, artificial
  Synthetic polypeptide
SIDYHGSTYYNP

SEQ ID NO: 291 - protein, 12 aa, artificial
  Synthetic polypeptide
SIDYLGSTYYNP

SEQ ID NO: 292 - protein, 12 aa, artificial
  Synthetic polypeptide
SIDYNGSTYYNP

SEQ ID NO: 293 - protein, 12 aa, artificial
  Synthetic polypeptide
SIDYTASTYYNP

SEQ ID NO: 294 - protein, 12 aa, artificial
  Synthetic polypeptide
SIDYTDSTYYNP

SEQ ID NO: 295 - protein, 12 aa, artificial
  Synthetic polypeptide
SIDYTESTYYNP

SEQ ID NO: 296 - protein, 12 aa, artificial
  Synthetic polypeptide
SIDYTHSTYYNP

SEQ ID NO: 297 - protein, 12 aa, artificial
  Synthetic polypeptide
SIDYTKSTYYNP

SEQ ID NO: 298 - protein, 12 aa, artificial
  Synthetic polypeptide
SIDYTNSTYYNP

SEQ ID NO: 299 - protein, 12 aa, artificial
  Synthetic polypeptide
SIDYTQSTYYNP

SEQ ID NO: 300 - protein, 12 aa, artificial
  Synthetic polypeptide
SIDYTRSTYYNP

SEQ ID NO: 301 - protein, 12 aa, artificial
  Synthetic polypeptide
SIDYTSSTYYNP

SEQ ID NO: 302 - protein, 12 aa, artificial
  Synthetic polypeptide
SIDYTTSTYYNP

SEQ ID NO: 303 - protein, 12 aa, artificial
  Synthetic polypeptide
SIDYTGATYYNP

SEQ ID NO: 304 - protein, 12 aa, artificial
  Synthetic polypeptide
SIDYTGDTYYNP

SEQ ID NO: 305 - protein, 12 aa, artificial
  Synthetic polypeptide
SIDYTGQTYYNP

SEQ ID NO: 306 - protein, 12 aa, artificial
  Synthetic polypeptide
SIDYTGTTYYNP

SEQ ID NO: 307 - protein, 12 aa, artificial
  Synthetic polypeptide
SIDYTGSAYYNP

SEQ ID NO: 308 - protein, 12 aa, artificial
  Synthetic polypeptide
SIDYTGSDYYNP

SEQ ID NO: 309 - protein, 12 aa, artificial
  Synthetic polypeptide
SIDYTGSEYYNP

SEQ ID NO: 310 - protein, 12 aa, artificial
  Synthetic polypeptide
SIDYTGSTAYNP

SEQ ID NO: 311 - protein, 12 aa, artificial
  Synthetic polypeptide
SIDYTGSTFYNP

SEQ ID NO: 312 - protein, 12 aa, artificial
  Synthetic polypeptide
SIDYTGSTQYNP

SEQ ID NO: 313 - protein, 12 aa, artificial
  Synthetic polypeptide
SIDYTGSTSYNP

SEQ ID NO: 314 - protein, 12 aa, artificial
  Synthetic polypeptide
SIDYTGSTWYNP

SEQ ID NO: 315 - protein, 12 aa, artificial
  Synthetic polypeptide
SIDYTGSTYYDP

SEQ ID NO: 316 - protein, 12 aa, artificial
  Synthetic polypeptide
SIDYTGSTYYEP

SEQ ID NO: 317 - protein, 12 aa, artificial
  Synthetic polypeptide
SIDYTGSTYYHP

SEQ ID NO: 318 - protein, 12 aa, artificial
  Synthetic polypeptide
SIDYTGSTYYPP

SEQ ID NO: 319 - protein, 12 aa, artificial
  Synthetic polypeptide
SIDYTGSTYYQP

SEQ ID NO: 320 - protein, 12 aa, artificial
  Synthetic polypeptide
SIDYTGSTYYNA

SEQ ID NO: 321 - protein, 12 aa, artificial
  Synthetic polypeptide
SIDYTGSTYYNE

SEQ ID NO: 322 - protein, 14 aa, artificial
  Synthetic polypeptide
  VARIANT (2)..(2): X at 2 is R, A, E, G, H, M, N, Q, S, T, or Y.
  VARIANT (4)..(4): X at 4 is K, A, or S.
  VARIANT (7)..(7): X at 7 is E, or T.
AXGXYYXTYLGFDV

SEQ ID NO: 323 - protein, 14 aa, artificial
  Synthetic polypeptide
AAGKYYETYLGFDV

SEQ ID NO: 324 - protein, 14 aa, artificial
  Synthetic polypeptide
AEGKYYETYLGFDV

SEQ ID NO: 325 - protein, 14 aa, artificial
  Synthetic polypeptide
AGGKYYETYLGFDV

SEQ ID NO: 326 - protein, 14 aa, artificial
  Synthetic polypeptide
AHGKYYETYLGFDV

SEQ ID NO: 327 - protein, 14 aa, artificial
  Synthetic polypeptide
AMGKYYETYLGFDV

SEQ ID NO: 328 - protein, 14 aa, artificial
  Synthetic polypeptide
ANGKYYETYLGFDV

SEQ ID NO: 329 - protein, 14 aa, artificial
  Synthetic polypeptide
AQGKYYETYLGFDV

SEQ ID NO: 330 - protein, 14 aa, artificial
  Synthetic polypeptide
ASGKYYETYLGFDV

SEQ ID NO: 331 - protein, 14 aa, artificial
  Synthetic polypeptide
ATGKYYETYLGFDV

SEQ ID NO: 332 - protein, 14 aa, artificial
  Synthetic polypeptide
AYGKYYETYLGFDV

SEQ ID NO: 333 - protein, 14 aa, artificial
  Synthetic polypeptide
ARGAYYETYLGFDV

SEQ ID NO: 334 - protein, 14 aa, artificial
  Synthetic polypeptide
ARGSYYETYLGFDV

SEQ ID NO: 335 - protein, 14 aa, artificial
  Synthetic polypeptide
ARGKYYTTYLGFDV

SEQ ID NO: 336 - protein, 7 aa, artificial
  Synthetic polypeptide
  VARIANT (1)..(1): X at 1 is S, or D.
  VARIANT (2)..(2): X at 2 is T, A, D, E, G, H, K, N, P, Q, R, or S.
  VARIANT (3)..(3): X at 3 is S, D, E, G, K, N, P, or R.
  VARIANT (4)..(4): X at 4 is S, G, K, N, or P.
  VARIANT (5)..(5): X at 5 is Y, A, D, E, G, H, M, N, Q, S, T, V, or W.
  VARIANT (6)..(6): X at 6 is Y, A, F, G, H, M, N, or Q.
XXXXXXW

SEQ ID NO: 337 - protein, 7 aa, artificial
  Synthetic polypeptide
DTSSYYW

SEQ ID NO: 338 - protein, 7 aa, artificial
  Synthetic polypeptide
SASSYYW

SEQ ID NO: 339 - protein, 7 aa, artificial
  Synthetic polypeptide
SDSSYYW

SEQ ID NO: 340 - protein, 7 aa, artificial
  Synthetic polypeptide
SESSYYW

SEQ ID NO: 341 - protein, 7 aa, artificial
  Synthetic polypeptide
SGSSYYW

SEQ ID NO: 342 - protein, 7 aa, artificial
  Synthetic polypeptide
SHSSYYW

SEQ ID NO: 343 - protein, 7 aa, artificial
  Synthetic polypeptide
SKSSYYW

SEQ ID NO: 344 - protein, 7 aa, artificial
  Synthetic polypeptide
SNSSYYW

SEQ ID NO: 345 - protein, 7 aa, artificial
  Synthetic polypeptide
SPSSYYW

SEQ ID NO: 346 - protein, 7 aa, artificial
  Synthetic polypeptide
SQSSYYW

SEQ ID NO: 347 - protein, 7 aa, artificial
  Synthetic polypeptide
SRSSYYW

SEQ ID NO: 348 - protein, 7 aa, artificial
  Synthetic polypeptide
SSSSYYW

SEQ ID NO: 349 - protein, 7 aa, artificial
  Synthetic polypeptide
STDSYYW

SEQ ID NO: 350 - protein, 7 aa, artificial
  Synthetic polypeptide
STESYYW

SEQ ID NO: 351 - protein, 7 aa, artificial
  Synthetic polypeptide
STGSYYW

SEQ ID NO: 352 - protein, 7 aa, artificial
  Synthetic polypeptide
STKSYYW

SEQ ID NO: 353 - protein, 7 aa, artificial
  Synthetic polypeptide
STNSYYW

SEQ ID NO: 354 - protein, 7 aa, artificial
  Synthetic polypeptide
STPSYYW

SEQ ID NO: 355 - protein, 7 aa, artificial
  Synthetic polypeptide
STRSYYW

SEQ ID NO: 356 - protein, 7 aa, artificial
  Synthetic polypeptide
STSGYYW

SEQ ID NO: 357 - protein, 7 aa, artificial
  Synthetic polypeptide
STSKYYW

SEQ ID NO: 358 - protein, 7 aa, artificial
  Synthetic polypeptide
STSNYYW

SEQ ID NO: 359 - protein, 7 aa, artificial
  Synthetic polypeptide
STSPYYW

SEQ ID NO: 360 - protein, 7 aa, artificial
  Synthetic polypeptide
STSSAYW

SEQ ID NO: 361 - protein, 7 aa, artificial
  Synthetic polypeptide
STSSDYW

SEQ ID NO: 362 - protein, 7 aa, artificial
  Synthetic polypeptide
STSSEYW

SEQ ID NO: 363 - protein, 7 aa, artificial
  Synthetic polypeptide
STSSGYW

SEQ ID NO: 364 - protein, 7 aa, artificial
  Synthetic polypeptide
STSSHYW

SEQ ID NO: 365 - protein, 7 aa, artificial
  Synthetic polypeptide
STSSMYW

SEQ ID NO: 366 - protein, 7 aa, artificial
  Synthetic polypeptide
STSSNYW

SEQ ID NO: 367 - protein, 7 aa, artificial
  Synthetic polypeptide
STSSQYW

SEQ ID NO: 368 - protein, 7 aa, artificial
  Synthetic polypeptide
STSSSYW

SEQ ID NO: 369 - protein, 7 aa, artificial
  Synthetic polypeptide
STSSTYW

SEQ ID NO: 370 - protein, 7 aa, artificial
  Synthetic polypeptide
STSSVYW

SEQ ID NO: 371 - protein, 7 aa, artificial
  Synthetic polypeptide
STSSWYW

SEQ ID NO: 372 - protein, 7 aa, artificial
  Synthetic polypeptide
STSSYAW

SEQ ID NO: 373 - protein, 7 aa, artificial
  Synthetic polypeptide
STSSYFW

SEQ ID NO: 374 - protein, 7 aa, artificial
  Synthetic polypeptide
STSSYGW

SEQ ID NO: 375 - protein, 7 aa, artificial
  Synthetic polypeptide
STSSYHW

SEQ ID NO: 376 - protein, 7 aa, artificial
  Synthetic polypeptide
STSSYMW

SEQ ID NO: 377 - protein, 7 aa, artificial
  Synthetic polypeptide
STSSYNW

SEQ ID NO: 378 - protein, 7 aa, artificial
  Synthetic polypeptide
STSSYQW

SEQ ID NO: 379 - protein, 12 aa, artificial
  Synthetic polypeptide
  VARIANT (1)..(1): X at 1 is S, F, I, M, or Q.
  VARIANT (2)..(2): X at 2 is I, A, G, L, R, S, T, or V.
  VARIANT (3)..(3): X at 3 is Y, A, D, E, F, G, H, K, L, M, N, P, Q, R, S, T, or W.
  VARIANT (4)..(4): X at 4 is Y, A, D, E, F, G, H, K, N, P, Q, R, S, T, or W.
  VARIANT (5)..(5): X at 5 is T, D, E, K, N, P, or Q.
  VARIANT (6)..(6): X at 6 is G, or Q.
  VARIANT (7)..(7): X at 7 is N, D, E, G, H, I, K, M, P, R, or S.
  VARIANT (8)..(8): X at 8 is T, A, E, F, G, H, K, P, Q, R, S, V, W, or Y.
  VARIANT (9)..(9): X at 9 is Y, or W.
  VARIANT (11)..(11): X at 11 is N, A, D, E, K, L, M, P, Q, S or T.
  misc_feature (11)..(11): Xaa can be any naturally occurring amino acid
XXXXXXXXXYXP

SEQ ID NO: 380 - protein, 12 aa, artificial
  Synthetic polypeptide
FIYYTGNTYYNP

SEQ ID NO: 381 - protein, 12 aa, artificial
  Synthetic polypeptide
IIYYTGNTYYNP

SEQ ID NO: 382 - protein, 12 aa, artificial
  Synthetic polypeptide
MIYYTGNTYYNP

SEQ ID NO: 383 - protein, 12 aa, artificial
  Synthetic polypeptide
QIYYTGNTYYNP

SEQ ID NO: 384 - protein, 12 aa, artificial
  Synthetic polypeptide
SAYYTGNTYYNP

SEQ ID NO: 385 - protein, 12 aa, artificial
  Synthetic polypeptide
SGYYTGNTYYNP

SEQ ID NO: 386 - protein, 12 aa, artificial
  Synthetic polypeptide
SLYYTGNTYYNP

SEQ ID NO: 387 - protein, 12 aa, artificial
  Synthetic polypeptide
SRYYTGNTYYNP

SEQ ID NO: 388 - protein, 12 aa, artificial
  Synthetic polypeptide
SSYYTGNTYYNP

SEQ ID NO: 389 - protein, 12 aa, artificial
  Synthetic polypeptide
STYYTGNTYYNP

SEQ ID NO: 390 - protein, 12 aa, artificial
  Synthetic polypeptide
SVYYTGNTYYNP

SEQ ID NO: 391 - protein, 12 aa, artificial
  Synthetic polypeptide
SIAYTGNTYYNP

SEQ ID NO: 392 - protein, 12 aa, artificial
  Synthetic polypeptide
SIDYTGNTYYNP

SEQ ID NO: 393 - protein, 12 aa, artificial
  Synthetic polypeptide
SIEYTGNTYYNP

SEQ ID NO: 394 - protein, 12 aa, artificial
  Synthetic polypeptide
SIFYTGNTYYNP

SEQ ID NO: 395 - protein, 12 aa, artificial
  Synthetic polypeptide
SIGYTGNTYYNP

SEQ ID NO: 396 - protein, 12 aa, artificial
  Synthetic polypeptide
SIHYTGNTYYNP

SEQ ID NO: 397 - protein, 12 aa, artificial
  Synthetic polypeptide
SIKYTGNTYYNP

SEQ ID NO: 398 - protein, 12 aa, artificial
  Synthetic polypeptide
SILYTGNTYYNP

SEQ ID NO: 399 - protein, 12 aa, artificial
  Synthetic polypeptide
SIMYTGNTYYNP

SEQ ID NO: 400 - protein, 12 aa, artificial
  Synthetic polypeptide
SINYTGNTYYNP

SEQ ID NO: 401 - protein, 12 aa, artificial
  Synthetic polypeptide
SIPYTGNTYYNP

SEQ ID NO: 402 - protein, 12 aa, artificial
  Synthetic polypeptide
SIQYTGNTYYNP

SEQ ID NO: 403 - protein, 12 aa, artificial
  Synthetic polypeptide
SIRYTGNTYYNP

SEQ ID NO: 404 - protein, 12 aa, artificial
  Synthetic polypeptide
SISYTGNTYYNP

SEQ ID NO: 405 - protein, 12 aa, artificial
  Synthetic polypeptide
SITYTGNTYYNP

SEQ ID NO: 406 - protein, 12 aa, artificial
  Synthetic polypeptide
SIWYTGNTYYNP

SEQ ID NO: 407 - protein, 12 aa, artificial
  Synthetic polypeptide
SIYATGNTYYNP

SEQ ID NO: 408 - protein, 12 aa, artificial
  Synthetic polypeptide
SIYDTGNTYYNP

SEQ ID NO: 409 - protein, 12 aa, artificial
  Synthetic polypeptide
SIYETGNTYYNP

SEQ ID NO: 410 - protein, 12 aa, artificial
  Synthetic polypeptide
SIYFTGNTYYNP

SEQ ID NO: 411 - protein, 12 aa, artificial
  Synthetic polypeptide
SIYGTGNTYYNP

SEQ ID NO: 412 - protein, 12 aa, artificial
  Synthetic polypeptide
SIYHTGNTYYNP

SEQ ID NO: 413 - protein, 12 aa, artificial
  Synthetic polypeptide
SIYKTGNTYYNP

SEQ ID NO: 414 - protein, 12 aa, artificial
  Synthetic polypeptide
SIYNTGNTYYNP

SEQ ID NO: 415 - protein, 12 aa, artificial
  Synthetic polypeptide
SIYPTGNTYYNP

SEQ ID NO: 416 - protein, 12 aa, artificial
  Synthetic polypeptide
SIYQTGNTYYNP

SEQ ID NO: 417 - protein, 12 aa, artificial
  Synthetic polypeptide
SIYRTGNTYYNP

SEQ ID NO: 418 - protein, 12 aa, artificial
  Synthetic polypeptide
SIYSTGNTYYNP

SEQ ID NO: 419 - protein, 12 aa, artificial
  Synthetic polypeptide
SIYTTGNTYYNP

SEQ ID NO: 420 - protein, 12 aa, artificial
  Synthetic polypeptide
SIYWTGNTYYNP

SEQ ID NO: 421 - protein, 12 aa, artificial
  Synthetic polypeptide
SIYYDGNTYYNP

SEQ ID NO: 422 - protein, 12 aa, artificial
  Synthetic polypeptide
SIYYEGNTYYNP

SEQ ID NO: 423 - protein, 12 aa, artificial
  Synthetic polypeptide
SIYYKGNTYYNP

SEQ ID NO: 424 - protein, 12 aa, artificial
  Synthetic polypeptide
SIYYNGNTYYNP

SEQ ID NO: 425 - protein, 12 aa, artificial
  Synthetic polypeptide
SIYYPGNTYYNP

SEQ ID NO: 426 - protein, 12 aa, artificial
  Synthetic polypeptide
SIYYQGNTYYNP

SEQ ID NO: 427 - protein, 12 aa, artificial
  Synthetic polypeptide
SIYYTQNTYYNP

SEQ ID NO: 428 - protein, 12 aa, artificial
  Synthetic polypeptide
SIYYTGDTYYNP

SEQ ID NO: 429 - protein, 12 aa, artificial
  Synthetic polypeptide
SIYYTGETYYNP

SEQ ID NO: 430 - protein, 12 aa, artificial
  Synthetic polypeptide
SIYYTGGTYYNP

SEQ ID NO: 431 - protein, 12 aa, artificial
  Synthetic polypeptide
SIYYTGHTYYNP

SEQ ID NO: 432 - protein, 12 aa, artificial
  Synthetic polypeptide
SIYYTGITYYNP

SEQ ID NO: 433 - protein, 12 aa, artificial
  Synthetic polypeptide
SIYYTGKTYYNP

SEQ ID NO: 434 - protein, 12 aa, artificial
  Synthetic polypeptide
SIYYTGMTYYNP

SEQ ID NO: 435 - protein, 12 aa, artificial
  Synthetic polypeptide
SIYYTGPTYYNP

SEQ ID NO: 436 - protein, 12 aa, artificial
  Synthetic polypeptide
SIYYTGRTYYNP

SEQ ID NO: 437 - protein, 12 aa, artificial
  Synthetic polypeptide
SIYYTGSTYYNP

SEQ ID NO: 438 - protein, 12 aa, artificial
  Synthetic polypeptide
SIYYTGNAYYNP

SEQ ID NO: 439 - protein, 12 aa, artificial
  Synthetic polypeptide
SIYYTGNEYYNP

SEQ ID NO: 440 - protein, 12 aa, artificial
  Synthetic polypeptide
SIYYTGNFYYNP

SEQ ID NO: 441 - protein, 12 aa, artificial
  Synthetic polypeptide
SIYYTGNGYYNP

SEQ ID NO: 442 - protein, 12 aa, artificial
  Synthetic polypeptide
SIYYTGNHYYNP

SEQ ID NO: 443 - protein, 12 aa, artificial
  Synthetic polypeptide
SIYYTGNKYYNP

SEQ ID NO: 444 - protein, 12 aa, artificial
  Synthetic polypeptide
SIYYTGNPYYNP

SEQ ID NO: 445 - protein, 12 aa, artificial
  Synthetic polypeptide
SIYYTGNQYYNP

SEQ ID NO: 446 - protein, 12 aa, artificial
  Synthetic polypeptide
SIYYTGNRYYNP

SEQ ID NO: 447 - protein, 12 aa, artificial
  Synthetic polypeptide
SIYYTGNSYYNP

SEQ ID NO: 448 - protein, 12 aa, artificial
  Synthetic polypeptide
SIYYTGNVYYNP

SEQ ID NO: 449 - protein, 12 aa, artificial
  Synthetic polypeptide
SIYYTGNWYYNP

SEQ ID NO: 450 - protein, 12 aa, artificial
  Synthetic polypeptide
SIYYTGNYYYNP

SEQ ID NO: 451 - protein, 12 aa, artificial
  Synthetic polypeptide
SIYYTGNTWYNP

SEQ ID NO: 452 - protein, 12 aa, artificial
  Synthetic polypeptide
SIYYTGNTYYAP

SEQ ID NO: 453 - protein, 12 aa, artificial
  Synthetic polypeptide
SIYYTGNTYYDP

SEQ ID NO: 454 - protein, 12 aa, artificial
  Synthetic polypeptide
SIYYTGNTYYEP

SEQ ID NO: 455 - protein, 12 aa, artificial
  Synthetic polypeptide
SIYYTGNTYYKP

SEQ ID NO: 456 - protein, 12 aa, artificial
  Synthetic polypeptide
SIYYTGNTYYLP

SEQ ID NO: 457 - protein, 12 aa, artificial
  Synthetic polypeptide
SIYYTGNTYYMP

SEQ ID NO: 458 - protein, 12 aa, artificial
  Synthetic polypeptide
SIYYTGNTYYPP

SEQ ID NO: 459 - protein, 12 aa, artificial
  Synthetic polypeptide
SIYYTGNTYYQP

SEQ ID NO: 460 - protein, 12 aa, artificial
  Synthetic polypeptide
SIYYTGNTYYSP

SEQ ID NO: 461 - protein, 12 aa, artificial
  Synthetic polypeptide
SIYYTGNTYYTP

SEQ ID NO: 462 - protein, 15 aa, artificial
  Synthetic polypeptide
  VARIANT (1)..(1): X at 1 is A, or V.
  VARIANT (2)..(2): X at 2 is R, A, G, N, Q, or T.
  VARIANT (3)..(3): X at 3 is V, A, F, I, K, L, M, Q, or S.
  VARIANT (4)..(4): X at 4 is R, A, I, K, L, M, P, Q, S, T, or V.
  VARIANT (5)..(5): X at 5 is Y, H, I, L, or V.
  VARIANT (7)..(7): X at 7 is V, A, F, G, K, M, N, Q, R, S, T, W, or Y.
  VARIANT (8)..(8): X at 8 is G, N, R, S, or T.
  VARIANT (12)..(12): X at 12 is Y, F, H, I, L, M, Q, or R.
XXXXXGXXVPRXFDP

SEQ ID NO: 463 - protein, 15 aa, artificial
  Synthetic polypeptide
VRVRYGVGVPRYFDP

SEQ ID NO: 464 - protein, 15 aa, artificial
  Synthetic polypeptide
AAVRYGVGVPRYFDP

SEQ ID NO: 465 - protein, 15 aa, artificial
  Synthetic polypeptide
AGVRYGVGVPRYFDP

SEQ ID NO: 466 - protein, 15 aa, artificial
  Synthetic polypeptide
ANVRYGVGVPRYFDP

SEQ ID NO: 467 - protein, 15 aa, artificial
  Synthetic polypeptide
AQVRYGVGVPRYFDP

SEQ ID NO: 468 - protein, 15 aa, artificial
  Synthetic polypeptide
ATVRYGVGVPRYFDP

SEQ ID NO: 469 - protein, 15 aa, artificial
  Synthetic polypeptide
ARARYGVGVPRYFDP

SEQ ID NO: 470 - protein, 15 aa, artificial
  Synthetic polypeptide
ARFRYGVGVPRYFDP

SEQ ID NO: 471 - protein, 15 aa, artificial
  Synthetic polypeptide
ARIRYGVGVPRYFDP

SEQ ID NO: 472 - protein, 15 aa, artificial
  Synthetic polypeptide
ARKRYGVGVPRYFDP

SEQ ID NO: 473 - protein, 15 aa, artificial
  Synthetic polypeptide
ARLRYGVGVPRYFDP

SEQ ID NO: 474 - protein, 15 aa, artificial
  Synthetic polypeptide
ARMRYGVGVPRYFDP

SEQ ID NO: 475 - protein, 15 aa, artificial
  Synthetic polypeptide
ARQRYGVGVPRYFDP

SEQ ID NO: 476 - protein, 15 aa, artificial
  Synthetic polypeptide
ARSRYGVGVPRYFDP

SEQ ID NO: 477 - protein, 15 aa, artificial
  Synthetic polypeptide
ARVAYGVGVPRYFDP

SEQ ID NO: 478 - protein, 15 aa, artificial
  Synthetic polypeptide
ARVIYGVGVPRYFDP

SEQ ID NO: 479 - protein, 15 aa, artificial
  Synthetic polypeptide
ARVKYGVGVPRYFDP

SEQ ID NO: 480 - protein, 15 aa, artificial
  Synthetic polypeptide
ARVLYGVGVPRYFDP

SEQ ID NO: 481 - protein, 15 aa, artificial
  Synthetic polypeptide
ARVMYGVGVPRYFDP

SEQ ID NO: 482 - protein, 15 aa, artificial
  Synthetic polypeptide
ARVPYGVGVPRYFDP

SEQ ID NO: 483 - protein, 15 aa, artificial
  Synthetic polypeptide
ARVQYGVGVPRYFDP

SEQ ID NO: 484 - protein, 15 aa, artificial
  Synthetic polypeptide
ARVSYGVGVPRYFDP

SEQ ID NO: 485 - protein, 15 aa, artificial
  Synthetic polypeptide
ARVTYGVGVPRYFDP

SEQ ID NO: 486 - protein, 15 aa, artificial
  Synthetic polypeptide
ARVVYGVGVPRYFDP

SEQ ID NO: 487 - protein, 15 aa, artificial
  Synthetic polypeptide
ARVRHGVGVPRYFDP

SEQ ID NO: 488 - protein, 15 aa, artificial
  Synthetic polypeptide
ARVRIGVGVPRYFDP

SEQ ID NO: 489 - protein, 15 aa, artificial
  Synthetic polypeptide
ARVRLGVGVPRYFDP

SEQ ID NO: 490 - protein, 15 aa, artificial
  Synthetic polypeptide
ARVRVGVGVPRYFDP

SEQ ID NO: 491 - protein, 15 aa, artificial
  Synthetic polypeptide
ARVRYGAGVPRYFDP

SEQ ID NO: 492 - protein, 15 aa, artificial
  Synthetic polypeptide
ARVRYGFGVPRYFDP

SEQ ID NO: 493 - protein, 15 aa, artificial
  Synthetic polypeptide
ARVRYGGGVPRYFDP

SEQ ID NO: 494 - protein, 15 aa, artificial
  Synthetic polypeptide
ARVRYGKGVPRYFDP

SEQ ID NO: 495 - protein, 15 aa, artificial
  Synthetic polypeptide
ARVRYGMGVPRYFDP

SEQ ID NO: 496 - protein, 15 aa, artificial
  Synthetic polypeptide
ARVRYGNGVPRYFDP

SEQ ID NO: 497 - protein, 15 aa, artificial
  Synthetic polypeptide
ARVRYGQGVPRYFDP

SEQ ID NO: 498 - protein, 15 aa, artificial
  Synthetic polypeptide
ARVRYGRGVPRYFDP

SEQ ID NO: 499 - protein, 15 aa, artificial
  Synthetic polypeptide
ARVRYGSGVPRYFDP

SEQ ID NO: 500 - protein, 15 aa, artificial
  Synthetic polypeptide
ARVRYGTGVPRYFDP

SEQ ID NO: 501 - protein, 15 aa, artificial
  Synthetic polypeptide
ARVRYGWGVPRYFDP

SEQ ID NO: 502 - protein, 15 aa, artificial
  Synthetic polypeptide
ARVRYGYGVPRYFDP

SEQ ID NO: 503 - protein, 15 aa, artificial
  Synthetic polypeptide
ARVRYGVNVPRYFDP

SEQ ID NO: 504 - protein, 15 aa, artificial
  Synthetic polypeptide
ARVRYGVRVPRYFDP

SEQ ID NO: 505 - protein, 15 aa, artificial
  Synthetic polypeptide
ARVRYGVSVPRYFDP

SEQ ID NO: 506 - protein, 15 aa, artificial
  Synthetic polypeptide
ARVRYGVTVPRYFDP

SEQ ID NO: 507 - protein, 15 aa, artificial
  Synthetic polypeptide
ARVRYGVGVPRFFDP

SEQ ID NO: 508 - protein, 15 aa, artificial
  Synthetic polypeptide
ARVRYGVGVPRHFDP

SEQ ID NO: 509 - protein, 15 aa, artificial
  Synthetic polypeptide
ARVRYGVGVPRIFDP

SEQ ID NO: 510 - protein, 15 aa, artificial
  Synthetic polypeptide
ARVRYGVGVPRLFDP

SEQ ID NO: 511 - protein, 15 aa, artificial
  Synthetic polypeptide
ARVRYGVGVPRMFDP

SEQ ID NO: 512 - protein, 15 aa, artificial
  Synthetic polypeptide
ARVRYGVGVPRQFDP

SEQ ID NO: 513 - protein, 15 aa, artificial
  Synthetic polypeptide
ARVRYGVGVPRRFDP

SEQ ID NO: 514 - DNA, 20 bp, artificial
  Synthetic oligonucleotide
taagcttggccgccatggcc

SEQ ID NO: 515 - DNA, 20 bp, artificial
  Synthetic oligonucleotide
acccggagacagggagaggc

SEQ ID NO: 516 - DNA, 25 bp, artificial
  Synthetic oligonucleotide
ctgtctccgggttaagattacaagg

SEQ ID NO: 517 - DNA, 25 bp, artificial
  Synthetic oligonucleotide
ccttgtaatcttaacccggagacag

SEQ ID NO: 518 - protein, 452 aa, artificial
  Synthetic polypeptide
ELQLQESGPGLVKPSETLSLTCTVSGGSITSSNYYWGWIRQPPGKGLEWIGSIDYTGSTYYNPSLKSRVTISVDTSKNQFSLKLSSVTAADTAVYYCARGKYYETYLGFDVWGQGTLVTVSSASTKGPSVFPLAPSSKSTSGGTAALGCLVKDYFPEPVTVSWNSGALTSGVHTFPAVLQSSGLYSLSSVVTVPSSSLGTQTYICNVNHKPSNTKVDKKVEPKSCDKTHTCPPCPAPELLGGPSVFLFPPKPKDTLMISRTPEVTCVVVDVSHEDPEVKFNWYVDGVEVHNAKTKPREEQYGSTYRVVSVLTVLHQDWLNGKEYKCKVSNKALPAPIEKTISKAKGQPREPQVYTLPPSRDELTKNQVSLTCLVKGFYPSDIAVEWESNGQPENNYKTTPPVLDSDGSFFLYSKLTVDKSRWQQGNVFSCSVMHEALHNHYTQKSLSLSPGK

SEQ ID NO: 519 - protein, 451 aa, artificial
  Synthetic polypeptide
ELQLQESGPGLVKPSETLSLTCTVSGGSITSSNYYWGWIRQPPGKGLEWIGSIDYTGSTYYNPSLKSRVTISVDTSKNQFSLKLSSVTAADTAVYYCARGKYYETYLGFDVWGQGTLVTVSSASTKGPSVFPLAPSSKSTSGGTAALGCLVKDYFPEPVTVSWNSGALTSGVHTFPAVLQSSGLYSLSSVVTVPSSSLGTQTYICNVNHKPSNTKVDKKVEPKSCDKTHTCPPCPAPELLGGPSVFLFPPKPKDTLYITREPEVTCVVVDVSHEDPEVKFNWYVDGVEVHNAKTKPREEQYGSTYRVVSVLTVLHQDWLNGKEYKCKVSNKALPAPIEKTISKAKGQPREPQVYTLPPSRDELTKNQVSLTCLVKGFYPSDIAVEWESNGQPENNYKTTPPVLDSDGSFFLYSKLTVDKSRWQQGNVFSCSVMHEALHNHYTQKSLSLSPG

SEQ ID NO: 520 - protein, 452 aa, artificial
  Synthetic polypeptide
ELQLQESGPGLVKPSETLSLTCTVSGGSITSSNYYWGWIRQPPGKGLEWIGSIDYTGSTYYNPSLKSRVTISVDTSKNQFSLKLSSVTAADTAVYYCARGKYYETYLGFDVWGQGTLVTVSSASTKGPSVFPLAPSSKSTSGGTAALGCLVKDYFPEPVTVSWNSGALTSGVHTFPAVLQSSGLYSLSSVVTVPSSSLGTQTYICNVNHKPSNTKVDKKVEPKSCDKTHTCPPCPAPELLGGPSVFLFPPKPKDTLYITREPEVTCVVVDVSHEDPEVKFNWYVDGVEVHNAKTKPREEQYGSTYRVVSVLTVLHQDWLNGKEYKCKVSNKALPAPIEKTISKAKGQPREPQVYTLPPSRDELTKNQVSLTCLVKGFYPSDIAVEWESNGQPENNYKTTPPVLDSDGSFFLYSKLTVDKSRWQQGNVFSCSVMHEALHNHYTQKSLSLSPGK

SEQ ID NO: 521 - protein, 452 aa, artificial
  Synthetic polypeptide
ELQLQESGPGLVKPSETLSLTCTVSGGSITSSNYYWGWIRQPPGKGLEWIGSIDYTGSTYYNPSLKSRVTISVDTSKNQFSLKLSSVTAADTAVYYCARGKYYETYLGFDVWGQGTLVTVSSASTKGPSVFPLAPSSKSTSGGTAALGCLVKDYFPEPVTVSWNSGALTSGVHTFPAVLQSSGLYSLSSVVTVPSSSLGTQTYICNVNHKPSNTKVDKKVEPKSCDKTHTCPPCPAPELLGGPSVFLFPPKPKDTLMISRTPEVTCVVVDVSHEDPEVKFNWYVDGVEVHNAKTKPREEQYGSTYRVVSVLTVLHQDWLNGKEYKCKVSNKALPAPIEKTISKAKGQPREPQVYTLPPSRDELTKNQVSLWCLVKGFYPSDIAVEWESNGQPENNYKTTPPVLDSDGSFFLYSKLTVDKSRWQQGNVFSCSVMHEALHNHYTQKSLSLSPGK

SEQ ID NO: 522 - protein, 451 aa, artificial
  Synthetic polypeptide
ELQLQESGPGLVKPSETLSLTCTVSGGSITSSNYYWGWIRQPPGKGLEWIGSIDYTGSTYYNPSLKSRVTISVDTSKNQFSLKLSSVTAADTAVYYCARGKYYETYLGFDVWGQGTLVTVSSASTKGPSVFPLAPSSKSTSGGTAALGCLVKDYFPEPVTVSWNSGALTSGVHTFPAVLQSSGLYSLSSVVTVPSSSLGTQTYICNVNHKPSNTKVDKKVEPKSCDKTHTCPPCPAPELLGGPSVFLFPPKPKDTLYITREPEVTCVVVDVSHEDPEVKFNWYVDGVEVHNAKTKPREEQYGSTYRVVSVLTVLHQDWLNGKEYKCKVSNKALPAPIEKTISKAKGQPREPQVYTLPPSRDELTKNQVSLWCLVKGFYPSDIAVEWESNGQPENNYKTTPPVLDSDGSFFLYSKLTVDKSRWQQGNVFSCSVMHEALHNHYTQKSLSLSPG

SEQ ID NO: 523 - protein, 452 aa, artificial
  Synthetic polypeptide
ELQLQESGPGLVKPSETLSLTCTVSGGSITSSNYYWGWIRQPPGKGLEWIGSIDYTGSTYYNPSLKSRVTISVDTSKNQFSLKLSSVTAADTAVYYCARGKYYETYLGFDVWGQGTLVTVSSASTKGPSVFPLAPSSKSTSGGTAALGCLVKDYFPEPVTVSWNSGALTSGVHTFPAVLQSSGLYSLSSVVTVPSSSLGTQTYICNVNHKPSNTKVDKKVEPKSCDKTHTCPPCPAPELLGGPSVFLFPPKPKDTLYITREPEVTCVVVDVSHEDPEVKFNWYVDGVEVHNAKTKPREEQYGSTYRVVSVLTVLHQDWLNGKEYKCKVSNKALPAPIEKTISKAKGQPREPQVYTLPPSRDELTKNQVSLWCLVKGFYPSDIAVEWESNGQPENNYKTTPPVLDSDGSFFLYSKLTVDKSRWQQGNVFSCSVMHEALHNHYTQKSLSLSPGK

SEQ ID NO: 524 - protein, 452 aa, artificial
  Synthetic polypeptide
ELQLQESGPGLVKPSETLSLTCTVSGGSITSSNYYWGWIRQPPGKGLEWIGSIDYTGSTYYNPSLKSRVTISVDTSKNQFSLKLSSVTAADTAVYYCARGKYYETYLGFDVWGQGTLVTVSSASTKGPSVFPLAPSSKSTSGGTAALGCLVKDYFPEPVTVSWNSGALTSGVHTFPAVLQSSGLYSLSSVVTVPSSSLGTQTYICNVNHKPSNTKVDKKVEPKSCDKTHTCPPCPAPELLGGPSVFLFPPKPKDTLMISRTPEVTCVVVDVSHEDPEVKFNWYVDGVEVHNAKTKPREEQYGSTYRVVSVLTVLHQDWLNGKEYKCKVSNKALPAPIEKTISKAKGQPREPQVYTLPPSRDELTKNQVSLSCAVKGFYPSDIAVEWESNGQPENNYKTTPPVLDSDGSFFLVSKLTVDKSRWQQGNVFSCSVMHEALHNHYTQKSLSLSPGK

SEQ ID NO: 525 - protein, 451 aa, artificial
  Synthetic polypeptide
ELQLQESGPGLVKPSETLSLTCTVSGGSITSSNYYWGWIRQPPGKGLEWIGSIDYTGSTYYNPSLKSRVTISVDTSKNQFSLKLSSVTAADTAVYYCARGKYYETYLGFDVWGQGTLVTVSSASTKGPSVFPLAPSSKSTSGGTAALGCLVKDYFPEPVTVSWNSGALTSGVHTFPAVLQSSGLYSLSSVVTVPSSSLGTQTYICNVNHKPSNTKVDKKVEPKSCDKTHTCPPCPAPELLGGPSVFLFPPKPKDTLYITREPEVTCVVVDVSHEDPEVKFNWYVDGVEVHNAKTKPREEQYGSTYRVVSVLTVLHQDWLNGKEYKCKVSNKALPAPIEKTISKAKGQPREPQVYTLPPSRDELTKNQVSLSCAVKGFYPSDIAVEWESNGQPENNYKTTPPVLDSDGSFFLVSKLTVDKSRWQQGNVFSCSVMHEALHNHYTQKSLSLSPG

SEQ ID NO: 526 - protein, 452 aa, artificial
  Synthetic polypeptide
ELQLQESGPGLVKPSETLSLTCTVSGGSITSSNYYWGWIRQPPGKGLEWIGSIDYTGSTYYNPSLKSRVTISVDTSKNQFSLKLSSVTAADTAVYYCARGKYYETYLGFDVWGQGTLVTVSSASTKGPSVFPLAPSSKSTSGGTAALGCLVKDYFPEPVTVSWNSGALTSGVHTFPAVLQSSGLYSLSSVVTVPSSSLGTQTYICNVNHKPSNTKVDKKVEPKSCDKTHTCPPCPAPELLGGPSVFLFPPKPKDTLYITREPEVTCVVVDVSHEDPEVKFNWYVDGVEVHNAKTKPREEQYGSTYRVVSVLTVLHQDWLNGKEYKCKVSNKALPAPIEKTISKAKGQPREPQVYTLPPSRDELTKNQVSLSCAVKGFYPSDIAVEWESNGQPENNYKTTPPVLDSDGSFFLVSKLTVDKSRWQQGNVFSCSVMHEALHNHYTQKSLSLSPGK

SEQ ID NO: 527 - protein, 452 aa, artificial
  Synthetic polypeptide
ELQLQESGPGLVKPSETLSLTCTVSGGSITSTNYYWGWIRQPPGKGLEWIGNIDYTGSTYYNASLKSRVTISVDTSKNQFSLKLSSVTAADTAVYYCATGKYYETYLGFDVWGQGTLVTVSSASTKGPSVFPLAPSSKSTSGGTAALGCLVKDYFPEPVTVSWNSGALTSGVHTFPAVLQSSGLYSLSSVVTVPSSSLGTQTYICNVNHKPSNTKVDKKVEPKSCDKTHTCPPCPAPELLGGPSVFLFPPKPKDTLMISRTPEVTCVVVDVSHEDPEVKFNWYVDGVEVHNAKTKPREEQYGSTYRVVSVLTVLHQDWLNGKEYKCKVSNKALPAPIEKTISKAKGQPREPQVYTLPPSRDELTKNQVSLTCLVKGFYPSDIAVEWESNGQPENNYKTTPPVLDSDGSFFLYSKLTVDKSRWQQGNVFSCSVMHEALHNHYTQKSLSLSPGK

SEQ ID NO: 528 - protein, 451 aa, artificial
  Synthetic polypeptide
ELQLQESGPGLVKPSETLSLTCTVSGGSITSTNYYWGWIRQPPGKGLEWIGNIDYTGSTYYNASLKSRVTISVDTSKNQFSLKLSSVTAADTAVYYCATGKYYETYLGFDVWGQGTLVTVSSASTKGPSVFPLAPSSKSTSGGTAALGCLVKDYFPEPVTVSWNSGALTSGVHTFPAVLQSSGLYSLSSVVTVPSSSLGTQTYICNVNHKPSNTKVDKKVEPKSCDKTHTCPPCPAPELLGGPSVFLFPPKPKDTLYITREPEVTCVVVDVSHEDPEVKFNWYVDGVEVHNAKTKPREEQYGSTYRVVSVLTVLHQDWLNGKEYKCKVSNKALPAPIEKTISKAKGQPREPQVYTLPPSRDELTKNQVSLTCLVKGFYPSDIAVEWESNGQPENNYKTTPPVLDSDGSFFLYSKLTVDKSRWQQGNVFSCSVMHEALHNHYTQKSLSLSPG

SEQ ID NO: 529 - protein, 452 aa, artificial
  Synthetic polypeptide
ELQLQESGPGLVKPSETLSLTCTVSGGSITSTNYYWGWIRQPPGKGLEWIGNIDYTGSTYYNASLKSRVTISVDTSKNQFSLKLSSVTAADTAVYYCATGKYYETYLGFDVWGQGTLVTVSSASTKGPSVFPLAPSSKSTSGGTAALGCLVKDYFPEPVTVSWNSGALTSGVHTFPAVLQSSGLYSLSSVVTVPSSSLGTQTYICNVNHKPSNTKVDKKVEPKSCDKTHTCPPCPAPELLGGPSVFLFPPKPKDTLYITREPEVTCVVVDVSHEDPEVKFNWYVDGVEVHNAKTKPREEQYGSTYRVVSVLTVLHQDWLNGKEYKCKVSNKALPAPIEKTISKAKGQPREPQVYTLPPSRDELTKNQVSLTCLVKGFYPSDIAVEWESNGQPENNYKTTPPVLDSDGSFFLYSKLTVDKSRWQQGNVFSCSVMHEALHNHYTQKSLSLSPGK

SEQ ID NO: 530 - protein, 452 aa, artificial
  Synthetic polypeptide
ELQLQESGPGLVKPSETLSLTCTVSGGSITSTNYYWGWIRQPPGKGLEWIGNIDYTGSTYYNASLKSRVTISVDTSKNQFSLKLSSVTAADTAVYYCATGKYYETYLGFDVWGQGTLVTVSSASTKGPSVFPLAPSSKSTSGGTAALGCLVKDYFPEPVTVSWNSGALTSGVHTFPAVLQSSGLYSLSSVVTVPSSSLGTQTYICNVNHKPSNTKVDKKVEPKSCDKTHTCPPCPAPELLGGPSVFLFPPKPKDTLMISRTPEVTCVVVDVSHEDPEVKFNWYVDGVEVHNAKTKPREEQYGSTYRVVSVLTVLHQDWLNGKEYKCKVSNKALPAPIEKTISKAKGQPREPQVYTLPPSRDELTKNQVSLWCLVKGFYPSDIAVEWESNGQPENNYKTTPPVLDSDGSFFLYSKLTVDKSRWQQGNVFSCSVMHEALHNHYTQKSLSLSPGK

SEQ ID NO: 531 - protein, 451 aa, artificial
  Synthetic polypeptide
ELQLQESGPGLVKPSETLSLTCTVSGGSITSTNYYWGWIRQPPGKGLEWIGNIDYTGSTYYNASLKSRVTISVDTSKNQFSLKLSSVTAADTAVYYCATGKYYETYLGFDVWGQGTLVTVSSASTKGPSVFPLAPSSKSTSGGTAALGCLVKDYFPEPVTVSWNSGALTSGVHTFPAVLQSSGLYSLSSVVTVPSSSLGTQTYICNVNHKPSNTKVDKKVEPKSCDKTHTCPPCPAPELLGGPSVFLFPPKPKDTLYITREPEVTCVVVDVSHEDPEVKFNWYVDGVEVHNAKTKPREEQYGSTYRVVSVLTVLHQDWLNGKEYKCKVSNKALPAPIEKTISKAKGQPREPQVYTLPPSRDELTKNQVSLWCLVKGFYPSDIAVEWESNGQPENNYKTTPPVLDSDGSFFLYSKLTVDKSRWQQGNVFSCSVMHEALHNHYTQKSLSLSPG

SEQ ID NO: 532 - protein, 452 aa, artificial
  Synthetic polypeptide
ELQLQESGPGLVKPSETLSLTCTVSGGSITSTNYYWGWIRQPPGKGLEWIGNIDYTGSTYYNASLKSRVTISVDTSKNQFSLKLSSVTAADTAVYYCATGKYYETYLGFDVWGQGTLVTVSSASTKGPSVFPLAPSSKSTSGGTAALGCLVKDYFPEPVTVSWNSGALTSGVHTFPAVLQSSGLYSLSSVVTVPSSSLGTQTYICNVNHKPSNTKVDKKVEPKSCDKTHTCPPCPAPELLGGPSVFLFPPKPKDTLYITREPEVTCVVVDVSHEDPEVKFNWYVDGVEVHNAKTKPREEQYGSTYRVVSVLTVLHQDWLNGKEYKCKVSNKALPAPIEKTISKAKGQPREPQVYTLPPSRDELTKNQVSLWCLVKGFYPSDIAVEWESNGQPENNYKTTPPVLDSDGSFFLYSKLTVDKSRWQQGNVFSCSVMHEALHNHYTQKSLSLSPGK

SEQ ID NO: 533 - protein, 452 aa, artificial
  Synthetic polypeptide
ELQLQESGPGLVKPSETLSLTCTVSGGSITSTNYYWGWIRQPPGKGLEWIGNIDYTGSTYYNASLKSRVTISVDTSKNQFSLKLSSVTAADTAVYYCATGKYYETYLGFDVWGQGTLVTVSSASTKGPSVFPLAPSSKSTSGGTAALGCLVKDYFPEPVTVSWNSGALTSGVHTFPAVLQSSGLYSLSSVVTVPSSSLGTQTYICNVNHKPSNTKVDKKVEPKSCDKTHTCPPCPAPELLGGPSVFLFPPKPKDTLMISRTPEVTCVVVDVSHEDPEVKFNWYVDGVEVHNAKTKPREEQYGSTYRVVSVLTVLHQDWLNGKEYKCKVSNKALPAPIEKTISKAKGQPREPQVYTLPPSRDELTKNQVSLSCAVKGFYPSDIAVEWESNGQPENNYKTTPPVLDSDGSFFLVSKLTVDKSRWQQGNVFSCSVMHEALHNHYTQKSLSLSPGK

SEQ ID NO: 534 - protein, 451 aa, artificial
  Synthetic polypeptide
ELQLQESGPGLVKPSETLSLTCTVSGGSITSTNYYWGWIRQPPGKGLEWIGNIDYTGSTYYNASLKSRVTISVDTSKNQFSLKLSSVTAADTAVYYCATGKYYETYLGFDVWGQGTLVTVSSASTKGPSVFPLAPSSKSTSGGTAALGCLVKDYFPEPVTVSWNSGALTSGVHTFPAVLQSSGLYSLSSVVTVPSSSLGTQTYICNVNHKPSNTKVDKKVEPKSCDKTHTCPPCPAPELLGGPSVFLFPPKPKDTLYITREPEVTCVVVDVSHEDPEVKFNWYVDGVEVHNAKTKPREEQYGSTYRVVSVLTVLHQDWLNGKEYKCKVSNKALPAPIEKTISKAKGQPREPQVYTLPPSRDELTKNQVSLSCAVKGFYPSDIAVEWESNGQPENNYKTTPPVLDSDGSFFLVSKLTVDKSRWQQGNVFSCSVMHEALHNHYTQKSLSLSPG

SEQ ID NO: 535 - protein, 452 aa, artificial
  Synthetic polypeptide
ELQLQESGPGLVKPSETLSLTCTVSGGSITSTNYYWGWIRQPPGKGLEWIGNIDYTGSTYYNASLKSRVTISVDTSKNQFSLKLSSVTAADTAVYYCATGKYYETYLGFDVWGQGTLVTVSSASTKGPSVFPLAPSSKSTSGGTAALGCLVKDYFPEPVTVSWNSGALTSGVHTFPAVLQSSGLYSLSSVVTVPSSSLGTQTYICNVNHKPSNTKVDKKVEPKSCDKTHTCPPCPAPELLGGPSVFLFPPKPKDTLYITREPEVTCVVVDVSHEDPEVKFNWYVDGVEVHNAKTKPREEQYGSTYRVVSVLTVLHQDWLNGKEYKCKVSNKALPAPIEKTISKAKGQPREPQVYTLPPSRDELTKNQVSLSCAVKGFYPSDIAVEWESNGQPENNYKTTPPVLDSDGSFFLVSKLTVDKSRWQQGNVFSCSVMHEALHNHYTQKSLSLSPGK

SEQ ID NO: 536 - protein, 452 aa, artificial
  Synthetic polypeptide
ELQLQESGPGLVKPSETLSLTCTVSGGSITSSNAYWGWIRQPPGKGLEWIGSIDYTGSTAYNPSLKSRVTISVDTSKNQFSLKLSSVTAADTAVYYCAHGKYYETYLGFDVWGQGTLVTVSSASTKGPSVFPLAPSSKSTSGGTAALGCLVKDYFPEPVTVSWNSGALTSGVHTFPAVLQSSGLYSLSSVVTVPSSSLGTQTYICNVNHKPSNTKVDKKVEPKSCDKTHTCPPCPAPELLGGPSVFLFPPKPKDTLMISRTPEVTCVVVDVSHEDPEVKFNWYVDGVEVHNAKTKPREEQYGSTYRVVSVLTVLHQDWLNGKEYKCKVSNKALPAPIEKTISKAKGQPREPQVYTLPPSRDELTKNQVSLTCLVKGFYPSDIAVEWESNGQPENNYKTTPPVLDSDGSFFLYSKLTVDKSRWQQGNVFSCSVMHEALHNHYTQKSLSLSPGK

SEQ ID NO: 537 - protein, 451 aa, artificial
  Synthetic polypeptide
ELQLQESGPGLVKPSETLSLTCTVSGGSITSSNAYWGWIRQPPGKGLEWIGSIDYTGSTAYNPSLKSRVTISVDTSKNQFSLKLSSVTAADTAVYYCAHGKYYETYLGFDVWGQGTLVTVSSASTKGPSVFPLAPSSKSTSGGTAALGCLVKDYFPEPVTVSWNSGALTSGVHTFPAVLQSSGLYSLSSVVTVPSSSLGTQTYICNVNHKPSNTKVDKKVEPKSCDKTHTCPPCPAPELLGGPSVFLFPPKPKDTLYITREPEVTCVVVDVSHEDPEVKFNWYVDGVEVHNAKTKPREEQYGSTYRVVSVLTVLHQDWLNGKEYKCKVSNKALPAPIEKTISKAKGQPREPQVYTLPPSRDELTKNQVSLTCLVKGFYPSDIAVEWESNGQPENNYKTTPPVLDSDGSFFLYSKLTVDKSRWQQGNVFSCSVMHEALHNHYTQKSLSLSPG

SEQ ID NO: 538 - protein, 452 aa, artificial
  Synthetic polypeptide
ELQLQESGPGLVKPSETLSLTCTVSGGSITSSNAYWGWIRQPPGKGLEWIGSIDYTGSTAYNPSLKSRVTISVDTSKNQFSLKLSSVTAADTAVYYCAHGKYYETYLGFDVWGQGTLVTVSSASTKGPSVFPLAPSSKSTSGGTAALGCLVKDYFPEPVTVSWNSGALTSGVHTFPAVLQSSGLYSLSSVVTVPSSSLGTQTYICNVNHKPSNTKVDKKVEPKSCDKTHTCPPCPAPELLGGPSVFLFPPKPKDTLYITREPEVTCVVVDVSHEDPEVKFNWYVDGVEVHNAKTKPREEQYGSTYRVVSVLTVLHQDWLNGKEYKCKVSNKALPAPIEKTISKAKGQPREPQVYTLPPSRDELTKNQVSLTCLVKGFYPSDIAVEWESNGQPENNYKTTPPVLDSDGSFFLYSKLTVDKSRWQQGNVFSCSVMHEALHNHYTQKSLSLSPGK

SEQ ID NO: 539 - protein, 452 aa, artificial
  Synthetic polypeptide
ELQLQESGPGLVKPSETLSLTCTVSGGSITSSNAYWGWIRQPPGKGLEWIGSIDYTGSTAYNPSLKSRVTISVDTSKNQFSLKLSSVTAADTAVYYCAHGKYYETYLGFDVWGQGTLVTVSSASTKGPSVFPLAPSSKSTSGGTAALGCLVKDYFPEPVTVSWNSGALTSGVHTFPAVLQSSGLYSLSSVVTVPSSSLGTQTYICNVNHKPSNTKVDKKVEPKSCDKTHTCPPCPAPELLGGPSVFLFPPKPKDTLMISRTPEVTCVVVDVSHEDPEVKFNWYVDGVEVHNAKTKPREEQYGSTYRVVSVLTVLHQDWLNGKEYKCKVSNKALPAPIEKTISKAKGQPREPQVYTLPPSRDELTKNQVSLWCLVKGFYPSDIAVEWESNGQPENNYKTTPPVLDSDGSFFLYSKLTVDKSRWQQGNVFSCSVMHEALHNHYTQKSLSLSPGK

SEQ ID NO: 540 - protein, 451 aa, artificial
  Synthetic polypeptide
ELQLQESGPGLVKPSETLSLTCTVSGGSITSSNAYWGWIRQPPGKGLEWIGSIDYTGSTAYNPSLKSRVTISVDTSKNQFSLKLSSVTAADTAVYYCAHGKYYETYLGFDVWGQGTLVTVSSASTKGPSVFPLAPSSKSTSGGTAALGCLVKDYFPEPVTVSWNSGALTSGVHTFPAVLQSSGLYSLSSVVTVPSSSLGTQTYICNVNHKPSNTKVDKKVEPKSCDKTHTCPPCPAPELLGGPSVFLFPPKPKDTLYITREPEVTCVVVDVSHEDPEVKFNWYVDGVEVHNAKTKPREEQYGSTYRVVSVLTVLHQDWLNGKEYKCKVSNKALPAPIEKTISKAKGQPREPQVYTLPPSRDELTKNQVSLWCLVKGFYPSDIAVEWESNGQPENNYKTTPPVLDSDGSFFLYSKLTVDKSRWQQGNVFSCSVMHEALHNHYTQKSLSLSPG

SEQ ID NO: 541 - protein, 452 aa, artificial
  Synthetic polypeptide
ELQLQESGPGLVKPSETLSLTCTVSGGSITSSNAYWGWIRQPPGKGLEWIGSIDYTGSTAYNPSLKSRVTISVDTSKNQFSLKLSSVTAADTAVYYCAHGKYYETYLGFDVWGQGTLVTVSSASTKGPSVFPLAPSSKSTSGGTAALGCLVKDYFPEPVTVSWNSGALTSGVHTFPAVLQSSGLYSLSSVVTVPSSSLGTQTYICNVNHKPSNTKVDKKVEPKSCDKTHTCPPCPAPELLGGPSVFLFPPKPKDTLYITREPEVTCVVVDVSHEDPEVKFNWYVDGVEVHNAKTKPREEQYGSTYRVVSVLTVLHQDWLNGKEYKCKVSNKALPAPIEKTISKAKGQPREPQVYTLPPSRDELTKNQVSLWCLVKGFYPSDIAVEWESNGQPENNYKTTPPVLDSDGSFFLYSKLTVDKSRWQQGNVFSCSVMHEALHNHYTQKSLSLSPGK

SEQ ID NO: 542 - protein, 452 aa, artificial
  Synthetic polypeptide
ELQLQESGPGLVKPSETLSLTCTVSGGSITSSNAYWGWIRQPPGKGLEWIGSIDYTGSTAYNPSLKSRVTISVDTSKNQFSLKLSSVTAADTAVYYCAHGKYYETYLGFDVWGQGTLVTVSSASTKGPSVFPLAPSSKSTSGGTAALGCLVKDYFPEPVTVSWNSGALTSGVHTFPAVLQSSGLYSLSSVVTVPSSSLGTQTYICNVNHKPSNTKVDKKVEPKSCDKTHTCPPCPAPELLGGPSVFLFPPKPKDTLMISRTPEVTCVVVDVSHEDPEVKFNWYVDGVEVHNAKTKPREEQYGSTYRVVSVLTVLHQDWLNGKEYKCKVSNKALPAPIEKTISKAKGQPREPQVYTLPPSRDELTKNQVSLSCAVKGFYPSDIAVEWESNGQPENNYKTTPPVLDSDGSFFLVSKLTVDKSRWQQGNVFSCSVMHEALHNHYTQKSLSLSPGK

SEQ ID NO: 543 - protein, 451 aa, artificial
  Synthetic polypeptide
ELQLQESGPGLVKPSETLSLTCTVSGGSITSSNAYWGWIRQPPGKGLEWIGSIDYTGSTAYNPSLKSRVTISVDTSKNQFSLKLSSVTAADTAVYYCAHGKYYETYLGFDVWGQGTLVTVSSASTKGPSVFPLAPSSKSTSGGTAALGCLVKDYFPEPVTVSWNSGALTSGVHTFPAVLQSSGLYSLSSVVTVPSSSLGTQTYICNVNHKPSNTKVDKKVEPKSCDKTHTCPPCPAPELLGGPSVFLFPPKPKDTLYITREPEVTCVVVDVSHEDPEVKFNWYVDGVEVHNAKTKPREEQYGSTYRVVSVLTVLHQDWLNGKEYKCKVSNKALPAPIEKTISKAKGQPREPQVYTLPPSRDELTKNQVSLSCAVKGFYPSDIAVEWESNGQPENNYKTTPPVLDSDGSFFLVSKLTVDKSRWQQGNVFSCSVMHEALHNHYTQKSLSLSPG

SEQ ID NO: 544 - protein, 452 aa, artificial
  Synthetic polypeptide
ELQLQESGPGLVKPSETLSLTCTVSGGSITSSNAYWGWIRQPPGKGLEWIGSIDYTGSTAYNPSLKSRVTISVDTSKNQFSLKLSSVTAADTAVYYCAHGKYYETYLGFDVWGQGTLVTVSSASTKGPSVFPLAPSSKSTSGGTAALGCLVKDYFPEPVTVSWNSGALTSGVHTFPAVLQSSGLYSLSSVVTVPSSSLGTQTYICNVNHKPSNTKVDKKVEPKSCDKTHTCPPCPAPELLGGPSVFLFPPKPKDTLYITREPEVTCVVVDVSHEDPEVKFNWYVDGVEVHNAKTKPREEQYGSTYRVVSVLTVLHQDWLNGKEYKCKVSNKALPAPIEKTISKAKGQPREPQVYTLPPSRDELTKNQVSLSCAVKGFYPSDIAVEWESNGQPENNYKTTPPVLDSDGSFFLVSKLTVDKSRWQQGNVFSCSVMHEALHNHYTQKSLSLSPGK

SEQ ID NO: 545 - protein, 452 aa, artificial
  Synthetic polypeptide
ELQLQESGPGLVKPSETLSLTCTVSGGSITASNYYWGWIRQPPGKGLEWIGSIDYTGSTYYNTSLKSRVTISVDTSKNQFSLKLSSVTAADTAVYYCATGKYYETYLGFDVWGQGTLVTVSSASTKGPSVFPLAPSSKSTSGGTAALGCLVKDYFPEPVTVSWNSGALTSGVHTFPAVLQSSGLYSLSSVVTVPSSSLGTQTYICNVNHKPSNTKVDKKVEPKSCDKTHTCPPCPAPELLGGPSVFLFPPKPKDTLMISRTPEVTCVVVDVSHEDPEVKFNWYVDGVEVHNAKTKPREEQYGSTYRVVSVLTVLHQDWLNGKEYKCKVSNKALPAPIEKTISKAKGQPREPQVYTLPPSRDELTKNQVSLTCLVKGFYPSDIAVEWESNGQPENNYKTTPPVLDSDGSFFLYSKLTVDKSRWQQGNVFSCSVMHEALHNHYTQKSLSLSPGK

SEQ ID NO: 546 - protein, 451 aa, artificial
  Synthetic polypeptide
ELQLQESGPGLVKPSETLSLTCTVSGGSITASNYYWGWIRQPPGKGLEWIGSIDYTGSTYYNTSLKSRVTISVDTSKNQFSLKLSSVTAADTAVYYCATGKYYETYLGFDVWGQGTLVTVSSASTKGPSVFPLAPSSKSTSGGTAALGCLVKDYFPEPVTVSWNSGALTSGVHTFPAVLQSSGLYSLSSVVTVPSSSLGTQTYICNVNHKPSNTKVDKKVEPKSCDKTHTCPPCPAPELLGGPSVFLFPPKPKDTLYITREPEVTCVVVDVSHEDPEVKFNWYVDGVEVHNAKTKPREEQYGSTYRVVSVLTVLHQDWLNGKEYKCKVSNKALPAPIEKTISKAKGQPREPQVYTLPPSRDELTKNQVSLTCLVKGFYPSDIAVEWESNGQPENNYKTTPPVLDSDGSFFLYSKLTVDKSRWQQGNVFSCSVMHEALHNHYTQKSLSLSPG

SEQ ID NO: 547 - protein, 452 aa, artificial
  Synthetic polypeptide
ELQLQESGPGLVKPSETLSLTCTVSGGSITASNYYWGWIRQPPGKGLEWIGSIDYTGSTYYNTSLKSRVTISVDTSKNQFSLKLSSVTAADTAVYYCATGKYYETYLGFDVWGQGTLVTVSSASTKGPSVFPLAPSSKSTSGGTAALGCLVKDYFPEPVTVSWNSGALTSGVHTFPAVLQSSGLYSLSSVVTVPSSSLGTQTYICNVNHKPSNTKVDKKVEPKSCDKTHTCPPCPAPELLGGPSVFLFPPKPKDTLYITREPEVTCVVVDVSHEDPEVKFNWYVDGVEVHNAKTKPREEQYGSTYRVVSVLTVLHQDWLNGKEYKCKVSNKALPAPIEKTISKAKGQPREPQVYTLPPSRDELTKNQVSLTCLVKGFYPSDIAVEWESNGQPENNYKTTPPVLDSDGSFFLYSKLTVDKSRWQQGNVFSCSVMHEALHNHYTQKSLSLSPGK

SEQ ID NO: 548 - protein, 452 aa, artificial
  Synthetic polypeptide
ELQLQESGPGLVKPSETLSLTCTVSGGSITASNYYWGWIRQPPGKGLEWIGSIDYTGSTYYNTSLKSRVTISVDTSKNQFSLKLSSVTAADTAVYYCATGKYYETYLGFDVWGQGTLVTVSSASTKGPSVFPLAPSSKSTSGGTAALGCLVKDYFPEPVTVSWNSGALTSGVHTFPAVLQSSGLYSLSSVVTVPSSSLGTQTYICNVNHKPSNTKVDKKVEPKSCDKTHTCPPCPAPELLGGPSVFLFPPKPKDTLMISRTPEVTCVVVDVSHEDPEVKFNWYVDGVEVHNAKTKPREEQYGSTYRVVSVLTVLHQDWLNGKEYKCKVSNKALPAPIEKTISKAKGQPREPQVYTLPPSRDELTKNQVSLWCLVKGFYPSDIAVEWESNGQPENNYKTTPPVLDSDGSFFLYSKLTVDKSRWQQGNVFSCSVMHEALHNHYTQKSLSLSPGK

SEQ ID NO: 549 - protein, 451 aa, artificial
  Synthetic polypeptide
ELQLQESGPGLVKPSETLSLTCTVSGGSITASNYYWGWIRQPPGKGLEWIGSIDYTGSTYYNTSLKSRVTISVDTSKNQFSLKLSSVTAADTAVYYCATGKYYETYLGFDVWGQGTLVTVSSASTKGPSVFPLAPSSKSTSGGTAALGCLVKDYFPEPVTVSWNSGALTSGVHTFPAVLQSSGLYSLSSVVTVPSSSLGTQTYICNVNHKPSNTKVDKKVEPKSCDKTHTCPPCPAPELLGGPSVFLFPPKPKDTLYITREPEVTCVVVDVSHEDPEVKFNWYVDGVEVHNAKTKPREEQYGSTYRVVSVLTVLHQDWLNGKEYKCKVSNKALPAPIEKTISKAKGQPREPQVYTLPPSRDELTKNQVSLWCLVKGFYPSDIAVEWESNGQPENNYKTTPPVLDSDGSFFLYSKLTVDKSRWQQGNVFSCSVMHEALHNHYTQKSLSLSPG

SEQ ID NO: 550 - protein, 452 aa, artificial
  Synthetic polypeptide
ELQLQESGPGLVKPSETLSLTCTVSGGSITASNYYWGWIRQPPGKGLEWIGSIDYTGSTYYNTSLKSRVTISVDTSKNQFSLKLSSVTAADTAVYYCATGKYYETYLGFDVWGQGTLVTVSSASTKGPSVFPLAPSSKSTSGGTAALGCLVKDYFPEPVTVSWNSGALTSGVHTFPAVLQSSGLYSLSSVVTVPSSSLGTQTYICNVNHKPSNTKVDKKVEPKSCDKTHTCPPCPAPELLGGPSVFLFPPKPKDTLYITREPEVTCVVVDVSHEDPEVKFNWYVDGVEVHNAKTKPREEQYGSTYRVVSVLTVLHQDWLNGKEYKCKVSNKALPAPIEKTISKAKGQPREPQVYTLPPSRDELTKNQVSLWCLVKGFYPSDIAVEWESNGQPENNYKTTPPVLDSDGSFFLYSKLTVDKSRWQQGNVFSCSVMHEALHNHYTQKSLSLSPGK

SEQ ID NO: 551 - protein, 452 aa, artificial
  Synthetic polypeptide
ELQLQESGPGLVKPSETLSLTCTVSGGSITASNYYWGWIRQPPGKGLEWIGSIDYTGSTYYNTSLKSRVTISVDTSKNQFSLKLSSVTAADTAVYYCATGKYYETYLGFDVWGQGTLVTVSSASTKGPSVFPLAPSSKSTSGGTAALGCLVKDYFPEPVTVSWNSGALTSGVHTFPAVLQSSGLYSLSSVVTVPSSSLGTQTYICNVNHKPSNTKVDKKVEPKSCDKTHTCPPCPAPELLGGPSVFLFPPKPKDTLMISRTPEVTCVVVDVSHEDPEVKFNWYVDGVEVHNAKTKPREEQYGSTYRVVSVLTVLHQDWLNGKEYKCKVSNKALPAPIEKTISKAKGQPREPQVYTLPPSRDELTKNQVSLSCAVKGFYPSDIAVEWESNGQPENNYKTTPPVLDSDGSFFLVSKLTVDKSRWQQGNVFSCSVMHEALHNHYTQKSLSLSPGK

SEQ ID NO: 552 - protein, 451 aa, artificial
  Synthetic polypeptide
ELQLQESGPGLVKPSETLSLTCTVSGGSITASNYYWGWIRQPPGKGLEWIGSIDYTGSTYYNTSLKSRVTISVDTSKNQFSLKLSSVTAADTAVYYCATGKYYETYLGFDVWGQGTLVTVSSASTKGPSVFPLAPSSKSTSGGTAALGCLVKDYFPEPVTVSWNSGALTSGVHTFPAVLQSSGLYSLSSVVTVPSSSLGTQTYICNVNHKPSNTKVDKKVEPKSCDKTHTCPPCPAPELLGGPSVFLFPPKPKDTLYITREPEVTCVVVDVSHEDPEVKFNWYVDGVEVHNAKTKPREEQYGSTYRVVSVLTVLHQDWLNGKEYKCKVSNKALPAPIEKTISKAKGQPREPQVYTLPPSRDELTKNQVSLSCAVKGFYPSDIAVEWESNGQPENNYKTTPPVLDSDGSFFLVSKLTVDKSRWQQGNVFSCSVMHEALHNHYTQKSLSLSPG

SEQ ID NO: 553 - protein, 452 aa, artificial
  Synthetic polypeptide
ELQLQESGPGLVKPSETLSLTCTVSGGSITASNYYWGWIRQPPGKGLEWIGSIDYTGSTYYNTSLKSRVTISVDTSKNQFSLKLSSVTAADTAVYYCATGKYYETYLGFDVWGQGTLVTVSSASTKGPSVFPLAPSSKSTSGGTAALGCLVKDYFPEPVTVSWNSGALTSGVHTFPAVLQSSGLYSLSSVVTVPSSSLGTQTYICNVNHKPSNTKVDKKVEPKSCDKTHTCPPCPAPELLGGPSVFLFPPKPKDTLYITREPEVTCVVVDVSHEDPEVKFNWYVDGVEVHNAKTKPREEQYGSTYRVVSVLTVLHQDWLNGKEYKCKVSNKALPAPIEKTISKAKGQPREPQVYTLPPSRDELTKNQVSLSCAVKGFYPSDIAVEWESNGQPENNYKTTPPVLDSDGSFFLVSKLTVDKSRWQQGNVFSCSVMHEALHNHYTQKSLSLSPGK

SEQ ID NO: 554 - protein, 452 aa, artificial
  Synthetic polypeptide
ELQLQESGPGLVKPSETLSLTCTVSGGSITASNYYWGWIRQPPGKGLEWIGSIDYTGSTYYNPSLKSRVTISVDTSKNQFSLKLSSVTAADTAVYYCATGKYYETYLGFDVWGQGTLVTVSSASTKGPSVFPLAPSSKSTSGGTAALGCLVKDYFPEPVTVSWNSGALTSGVHTFPAVLQSSGLYSLSSVVTVPSSSLGTQTYICNVNHKPSNTKVDKKVEPKSCDKTHTCPPCPAPELLGGPSVFLFPPKPKDTLMISRTPEVTCVVVDVSHEDPEVKFNWYVDGVEVHNAKTKPREEQYGSTYRVVSVLTVLHQDWLNGKEYKCKVSNKALPAPIEKTISKAKGQPREPQVYTLPPSRDELTKNQVSLTCLVKGFYPSDIAVEWESNGQPENNYKTTPPVLDSDGSFFLYSKLTVDKSRWQQGNVFSCSVMHEALHNHYTQKSLSLSPGK

SEQ ID NO: 555 - protein, 451 aa, artificial
  Synthetic polypeptide
ELQLQESGPGLVKPSETLSLTCTVSGGSITASNYYWGWIRQPPGKGLEWIGSIDYTGSTYYNPSLKSRVTISVDTSKNQFSLKLSSVTAADTAVYYCATGKYYETYLGFDVWGQGTLVTVSSASTKGPSVFPLAPSSKSTSGGTAALGCLVKDYFPEPVTVSWNSGALTSGVHTFPAVLQSSGLYSLSSVVTVPSSSLGTQTYICNVNHKPSNTKVDKKVEPKSCDKTHTCPPCPAPELLGGPSVFLFPPKPKDTLYITREPEVTCVVVDVSHEDPEVKFNWYVDGVEVHNAKTKPREEQYGSTYRVVSVLTVLHQDWLNGKEYKCKVSNKALPAPIEKTISKAKGQPREPQVYTLPPSRDELTKNQVSLTCLVKGFYPSDIAVEWESNGQPENNYKTTPPVLDSDGSFFLYSKLTVDKSRWQQGNVFSCSVMHEALHNHYTQKSLSLSPG

SEQ ID NO: 556 - protein, 452 aa, artificial
  Synthetic polypeptide
ELQLQESGPGLVKPSETLSLTCTVSGGSITASNYYWGWIRQPPGKGLEWIGSIDYTGSTYYNPSLKSRVTISVDTSKNQFSLKLSSVTAADTAVYYCATGKYYETYLGFDVWGQGTLVTVSSASTKGPSVFPLAPSSKSTSGGTAALGCLVKDYFPEPVTVSWNSGALTSGVHTFPAVLQSSGLYSLSSVVTVPSSSLGTQTYICNVNHKPSNTKVDKKVEPKSCDKTHTCPPCPAPELLGGPSVFLFPPKPKDTLYITREPEVTCVVVDVSHEDPEVKFNWYVDGVEVHNAKTKPREEQYGSTYRVVSVLTVLHQDWLNGKEYKCKVSNKALPAPIEKTISKAKGQPREPQVYTLPPSRDELTKNQVSLTCLVKGFYPSDIAVEWESNGQPENNYKTTPPVLDSDGSFFLYSKLTVDKSRWQQGNVFSCSVMHEALHNHYTQKSLSLSPGK

SEQ ID NO: 557 - protein, 452 aa, artificial
  Synthetic polypeptide
ELQLQESGPGLVKPSETLSLTCTVSGGSITASNYYWGWIRQPPGKGLEWIGSIDYTGSTYYNPSLKSRVTISVDTSKNQFSLKLSSVTAADTAVYYCATGKYYETYLGFDVWGQGTLVTVSSASTKGPSVFPLAPSSKSTSGGTAALGCLVKDYFPEPVTVSWNSGALTSGVHTFPAVLQSSGLYSLSSVVTVPSSSLGTQTYICNVNHKPSNTKVDKKVEPKSCDKTHTCPPCPAPELLGGPSVFLFPPKPKDTLMISRTPEVTCVVVDVSHEDPEVKFNWYVDGVEVHNAKTKPREEQYGSTYRVVSVLTVLHQDWLNGKEYKCKVSNKALPAPIEKTISKAKGQPREPQVYTLPPSRDELTKNQVSLWCLVKGFYPSDIAVEWESNGQPENNYKTTPPVLDSDGSFFLYSKLTVDKSRWQQGNVFSCSVMHEALHNHYTQKSLSLSPGK

SEQ ID NO: 558 - protein, 451 aa, artificial
  Synthetic polypeptide
ELQLQESGPGLVKPSETLSLTCTVSGGSITASNYYWGWIRQPPGKGLEWIGSIDYTGSTYYNPSLKSRVTISVDTSKNQFSLKLSSVTAADTAVYYCATGKYYETYLGFDVWGQGTLVTVSSASTKGPSVFPLAPSSKSTSGGTAALGCLVKDYFPEPVTVSWNSGALTSGVHTFPAVLQSSGLYSLSSVVTVPSSSLGTQTYICNVNHKPSNTKVDKKVEPKSCDKTHTCPPCPAPELLGGPSVFLFPPKPKDTLYITREPEVTCVVVDVSHEDPEVKFNWYVDGVEVHNAKTKPREEQYGSTYRVVSVLTVLHQDWLNGKEYKCKVSNKALPAPIEKTISKAKGQPREPQVYTLPPSRDELTKNQVSLWCLVKGFYPSDIAVEWESNGQPENNYKTTPPVLDSDGSFFLYSKLTVDKSRWQQGNVFSCSVMHEALHNHYTQKSLSLSPG

SEQ ID NO: 559 - protein, 452 aa, artificial
  Synthetic polypeptide
ELQLQESGPGLVKPSETLSLTCTVSGGSITASNYYWGWIRQPPGKGLEWIGSIDYTGSTYYNPSLKSRVTISVDTSKNQFSLKLSSVTAADTAVYYCATGKYYETYLGFDVWGQGTLVTVSSASTKGPSVFPLAPSSKSTSGGTAALGCLVKDYFPEPVTVSWNSGALTSGVHTFPAVLQSSGLYSLSSVVTVPSSSLGTQTYICNVNHKPSNTKVDKKVEPKSCDKTHTCPPCPAPELLGGPSVFLFPPKPKDTLYITREPEVTCVVVDVSHEDPEVKFNWYVDGVEVHNAKTKPREEQYGSTYRVVSVLTVLHQDWLNGKEYKCKVSNKALPAPIEKTISKAKGQPREPQVYTLPPSRDELTKNQVSLWCLVKGFYPSDIAVEWESNGQPENNYKTTPPVLDSDGSFFLYSKLTVDKSRWQQGNVFSCSVMHEALHNHYTQKSLSLSPGK

SEQ ID NO: 560 - protein, 452 aa, artificial
  Synthetic polypeptide
ELQLQESGPGLVKPSETLSLTCTVSGGSITASNYYWGWIRQPPGKGLEWIGSIDYTGSTYYNPSLKSRVTISVDTSKNQFSLKLSSVTAADTAVYYCATGKYYETYLGFDVWGQGTLVTVSSASTKGPSVFPLAPSSKSTSGGTAALGCLVKDYFPEPVTVSWNSGALTSGVHTFPAVLQSSGLYSLSSVVTVPSSSLGTQTYICNVNHKPSNTKVDKKVEPKSCDKTHTCPPCPAPELLGGPSVFLFPPKPKDTLMISRTPEVTCVVVDVSHEDPEVKFNWYVDGVEVHNAKTKPREEQYGSTYRVVSVLTVLHQDWLNGKEYKCKVSNKALPAPIEKTISKAKGQPREPQVYTLPPSRDELTKNQVSLSCAVKGFYPSDIAVEWESNGQPENNYKTTPPVLDSDGSFFLVSKLTVDKSRWQQGNVFSCSVMHEALHNHYTQKSLSLSPGK

SEQ ID NO: 561 - protein, 451 aa, artificial
  Synthetic polypeptide
ELQLQESGPGLVKPSETLSLTCTVSGGSITASNYYWGWIRQPPGKGLEWIGSIDYTGSTYYNPSLKSRVTISVDTSKNQFSLKLSSVTAADTAVYYCATGKYYETYLGFDVWGQGTLVTVSSASTKGPSVFPLAPSSKSTSGGTAALGCLVKDYFPEPVTVSWNSGALTSGVHTFPAVLQSSGLYSLSSVVTVPSSSLGTQTYICNVNHKPSNTKVDKKVEPKSCDKTHTCPPCPAPELLGGPSVFLFPPKPKDTLYITREPEVTCVVVDVSHEDPEVKFNWYVDGVEVHNAKTKPREEQYGSTYRVVSVLTVLHQDWLNGKEYKCKVSNKALPAPIEKTISKAKGQPREPQVYTLPPSRDELTKNQVSLSCAVKGFYPSDIAVEWESNGQPENNYKTTPPVLDSDGSFFLVSKLTVDKSRWQQGNVFSCSVMHEALHNHYTQKSLSLSPG

SEQ ID NO: 562 - protein, 452 aa, artificial
  Synthetic polypeptide
ELQLQESGPGLVKPSETLSLTCTVSGGSITASNYYWGWIRQPPGKGLEWIGSIDYTGSTYYNPSLKSRVTISVDTSKNQFSLKLSSVTAADTAVYYCATGKYYETYLGFDVWGQGTLVTVSSASTKGPSVFPLAPSSKSTSGGTAALGCLVKDYFPEPVTVSWNSGALTSGVHTFPAVLQSSGLYSLSSVVTVPSSSLGTQTYICNVNHKPSNTKVDKKVEPKSCDKTHTCPPCPAPELLGGPSVFLFPPKPKDTLYITREPEVTCVVVDVSHEDPEVKFNWYVDGVEVHNAKTKPREEQYGSTYRVVSVLTVLHQDWLNGKEYKCKVSNKALPAPIEKTISKAKGQPREPQVYTLPPSRDELTKNQVSLSCAVKGFYPSDIAVEWESNGQPENNYKTTPPVLDSDGSFFLVSKLTVDKSRWQQGNVFSCSVMHEALHNHYTQKSLSLSPGK

SEQ ID NO: 563 - protein, 452 aa, artificial
  Synthetic polypeptide
ELQLQESGPGLVKPSETLSLTCTVSGGSITASNYYWGWIRQPPGKGLEWIGSIDYTGSTYYEPSLKSRVTISVDTSKNQFSLKLSSVTAADTAVYYCATGSYYETYLGFDVWGQGTLVTVSSASTKGPSVFPLAPSSKSTSGGTAALGCLVKDYFPEPVTVSWNSGALTSGVHTFPAVLQSSGLYSLSSVVTVPSSSLGTQTYICNVNHKPSNTKVDKKVEPKSCDKTHTCPPCPAPELLGGPSVFLFPPKPKDTLMISRTPEVTCVVVDVSHEDPEVKFNWYVDGVEVHNAKTKPREEQYGSTYRVVSVLTVLHQDWLNGKEYKCKVSNKALPAPIEKTISKAKGQPREPQVYTLPPSRDELTKNQVSLTCLVKGFYPSDIAVEWESNGQPENNYKTTPPVLDSDGSFFLYSKLTVDKSRWQQGNVFSCSVMHEALHNHYTQKSLSLSPGK

SEQ ID NO: 564 - protein, 451 aa, artificial
  Synthetic polypeptide
ELQLQESGPGLVKPSETLSLTCTVSGGSITASNYYWGWIRQPPGKGLEWIGSIDYTGSTYYEPSLKSRVTISVDTSKNQFSLKLSSVTAADTAVYYCATGSYYETYLGFDVWGQGTLVTVSSASTKGPSVFPLAPSSKSTSGGTAALGCLVKDYFPEPVTVSWNSGALTSGVHTFPAVLQSSGLYSLSSVVTVPSSSLGTQTYICNVNHKPSNTKVDKKVEPKSCDKTHTCPPCPAPELLGGPSVFLFPPKPKDTLYITREPEVTCVVVDVSHEDPEVKFNWYVDGVEVHNAKTKPREEQYGSTYRVVSVLTVLHQDWLNGKEYKCKVSNKALPAPIEKTISKAKGQPREPQVYTLPPSRDELTKNQVSLTCLVKGFYPSDIAVEWESNGQPENNYKTTPPVLDSDGSFFLYSKLTVDKSRWQQGNVFSCSVMHEALHNHYTQKSLSLSPG

SEQ ID NO: 565 - protein, 452 aa, artificial
  Synthetic polypeptide
ELQLQESGPGLVKPSETLSLTCTVSGGSITASNYYWGWIRQPPGKGLEWIGSIDYTGSTYYEPSLKSRVTISVDTSKNQFSLKLSSVTAADTAVYYCATGSYYETYLGFDVWGQGTLVTVSSASTKGPSVFPLAPSSKSTSGGTAALGCLVKDYFPEPVTVSWNSGALTSGVHTFPAVLQSSGLYSLSSVVTVPSSSLGTQTYICNVNHKPSNTKVDKKVEPKSCDKTHTCPPCPAPELLGGPSVFLFPPKPKDTLYITREPEVTCVVVDVSHEDPEVKFNWYVDGVEVHNAKTKPREEQYGSTYRVVSVLTVLHQDWLNGKEYKCKVSNKALPAPIEKTISKAKGQPREPQVYTLPPSRDELTKNQVSLTCLVKGFYPSDIAVEWESNGQPENNYKTTPPVLDSDGSFFLYSKLTVDKSRWQQGNVFSCSVMHEALHNHYTQKSLSLSPGK

SEQ ID NO: 566 - protein, 452 aa, artificial
  Synthetic polypeptide
ELQLQESGPGLVKPSETLSLTCTVSGGSITASNYYWGWIRQPPGKGLEWIGSIDYTGSTYYEPSLKSRVTISVDTSKNQFSLKLSSVTAADTAVYYCATGSYYETYLGFDVWGQGTLVTVSSASTKGPSVFPLAPSSKSTSGGTAALGCLVKDYFPEPVTVSWNSGALTSGVHTFPAVLQSSGLYSLSSVVTVPSSSLGTQTYICNVNHKPSNTKVDKKVEPKSCDKTHTCPPCPAPELLGGPSVFLFPPKPKDTLMISRTPEVTCVVVDVSHEDPEVKFNWYVDGVEVHNAKTKPREEQYGSTYRVVSVLTVLHQDWLNGKEYKCKVSNKALPAPIEKTISKAKGQPREPQVYTLPPSRDELTKNQVSLWCLVKGFYPSDIAVEWESNGQPENNYKTTPPVLDSDGSFFLYSKLTVDKSRWQQGNVFSCSVMHEALHNHYTQKSLSLSPGK

SEQ ID NO: 567 - protein, 451 aa, artificial
  Synthetic polypeptide
ELQLQESGPGLVKPSETLSLTCTVSGGSITASNYYWGWIRQPPGKGLEWIGSIDYTGSTYYEPSLKSRVTISVDTSKNQFSLKLSSVTAADTAVYYCATGSYYETYLGFDVWGQGTLVTVSSASTKGPSVFPLAPSSKSTSGGTAALGCLVKDYFPEPVTVSWNSGALTSGVHTFPAVLQSSGLYSLSSVVTVPSSSLGTQTYICNVNHKPSNTKVDKKVEPKSCDKTHTCPPCPAPELLGGPSVFLFPPKPKDTLYITREPEVTCVVVDVSHEDPEVKFNWYVDGVEVHNAKTKPREEQYGSTYRVVSVLTVLHQDWLNGKEYKCKVSNKALPAPIEKTISKAKGQPREPQVYTLPPSRDELTKNQVSLWCLVKGFYPSDIAVEWESNGQPENNYKTTPPVLDSDGSFFLYSKLTVDKSRWQQGNVFSCSVMHEALHNHYTQKSLSLSPG

SEQ ID NO: 568 - protein, 452 aa, artificial
  Synthetic polypeptide
ELQLQESGPGLVKPSETLSLTCTVSGGSITASNYYWGWIRQPPGKGLEWIGSIDYTGSTYYEPSLKSRVTISVDTSKNQFSLKLSSVTAADTAVYYCATGSYYETYLGFDVWGQGTLVTVSSASTKGPSVFPLAPSSKSTSGGTAALGCLVKDYFPEPVTVSWNSGALTSGVHTFPAVLQSSGLYSLSSVVTVPSSSLGTQTYICNVNHKPSNTKVDKKVEPKSCDKTHTCPPCPAPELLGGPSVFLFPPKPKDTLYITREPEVTCVVVDVSHEDPEVKFNWYVDGVEVHNAKTKPREEQYGSTYRVVSVLTVLHQDWLNGKEYKCKVSNKALPAPIEKTISKAKGQPREPQVYTLPPSRDELTKNQVSLWCLVKGFYPSDIAVEWESNGQPENNYKTTPPVLDSDGSFFLYSKLTVDKSRWQQGNVFSCSVMHEALHNHYTQKSLSLSPGK

SEQ ID NO: 569 - protein, 452 aa, artificial
  Synthetic polypeptide
ELQLQESGPGLVKPSETLSLTCTVSGGSITASNYYWGWIRQPPGKGLEWIGSIDYTGSTYYEPSLKSRVTISVDTSKNQFSLKLSSVTAADTAVYYCATGSYYETYLGFDVWGQGTLVTVSSASTKGPSVFPLAPSSKSTSGGTAALGCLVKDYFPEPVTVSWNSGALTSGVHTFPAVLQSSGLYSLSSVVTVPSSSLGTQTYICNVNHKPSNTKVDKKVEPKSCDKTHTCPPCPAPELLGGPSVFLFPPKPKDTLMISRTPEVTCVVVDVSHEDPEVKFNWYVDGVEVHNAKTKPREEQYGSTYRVVSVLTVLHQDWLNGKEYKCKVSNKALPAPIEKTISKAKGQPREPQVYTLPPSRDELTKNQVSLSCAVKGFYPSDIAVEWESNGQPENNYKTTPPVLDSDGSFFLVSKLTVDKSRWQQGNVFSCSVMHEALHNHYTQKSLSLSPGK

SEQ ID NO: 570 - protein, 451 aa, artificial
  Synthetic polypeptide
ELQLQESGPGLVKPSETLSLTCTVSGGSITASNYYWGWIRQPPGKGLEWIGSIDYTGSTYYEPSLKSRVTISVDTSKNQFSLKLSSVTAADTAVYYCATGSYYETYLGFDVWGQGTLVTVSSASTKGPSVFPLAPSSKSTSGGTAALGCLVKDYFPEPVTVSWNSGALTSGVHTFPAVLQSSGLYSLSSVVTVPSSSLGTQTYICNVNHKPSNTKVDKKVEPKSCDKTHTCPPCPAPELLGGPSVFLFPPKPKDTLYITREPEVTCVVVDVSHEDPEVKFNWYVDGVEVHNAKTKPREEQYGSTYRVVSVLTVLHQDWLNGKEYKCKVSNKALPAPIEKTISKAKGQPREPQVYTLPPSRDELTKNQVSLSCAVKGFYPSDIAVEWESNGQPENNYKTTPPVLDSDGSFFLVSKLTVDKSRWQQGNVFSCSVMHEALHNHYTQKSLSLSPG

SEQ ID NO: 571 - protein, 452 aa, artificial
  Synthetic polypeptide
ELQLQESGPGLVKPSETLSLTCTVSGGSITASNYYWGWIRQPPGKGLEWIGSIDYTGSTYYEPSLKSRVTISVDTSKNQFSLKLSSVTAADTAVYYCATGSYYETYLGFDVWGQGTLVTVSSASTKGPSVFPLAPSSKSTSGGTAALGCLVKDYFPEPVTVSWNSGALTSGVHTFPAVLQSSGLYSLSSVVTVPSSSLGTQTYICNVNHKPSNTKVDKKVEPKSCDKTHTCPPCPAPELLGGPSVFLFPPKPKDTLYITREPEVTCVVVDVSHEDPEVKFNWYVDGVEVHNAKTKPREEQYGSTYRVVSVLTVLHQDWLNGKEYKCKVSNKALPAPIEKTISKAKGQPREPQVYTLPPSRDELTKNQVSLSCAVKGFYPSDIAVEWESNGQPENNYKTTPPVLDSDGSFFLVSKLTVDKSRWQQGNVFSCSVMHEALHNHYTQKSLSLSPGK

SEQ ID NO: 572 - protein, 452 aa, artificial
  Synthetic polypeptide
ELQLQESGPGLVKPSETLSLTCTVSGGSITASNYYWGWIRQPPGKGLEWIGSIDYTGSTYYEPSLKSRVTISVDTSKNQFSLKLSSVTAADTAVYYCATGNYYETYLGFDVWGQGTLVTVSSASTKGPSVFPLAPSSKSTSGGTAALGCLVKDYFPEPVTVSWNSGALTSGVHTFPAVLQSSGLYSLSSVVTVPSSSLGTQTYICNVNHKPSNTKVDKKVEPKSCDKTHTCPPCPAPELLGGPSVFLFPPKPKDTLMISRTPEVTCVVVDVSHEDPEVKFNWYVDGVEVHNAKTKPREEQYGSTYRVVSVLTVLHQDWLNGKEYKCKVSNKALPAPIEKTISKAKGQPREPQVYTLPPSRDELTKNQVSLTCLVKGFYPSDIAVEWESNGQPENNYKTTPPVLDSDGSFFLYSKLTVDKSRWQQGNVFSCSVMHEALHNHYTQKSLSLSPGK

SEQ ID NO: 573 - protein, 451 aa, artificial
  Synthetic polypeptide
ELQLQESGPGLVKPSETLSLTCTVSGGSITASNYYWGWIRQPPGKGLEWIGSIDYTGSTYYEPSLKSRVTISVDTSKNQFSLKLSSVTAADTAVYYCATGNYYETYLGFDVWGQGTLVTVSSASTKGPSVFPLAPSSKSTSGGTAALGCLVKDYFPEPVTVSWNSGALTSGVHTFPAVLQSSGLYSLSSVVTVPSSSLGTQTYICNVNHKPSNTKVDKKVEPKSCDKTHTCPPCPAPELLGGPSVFLFPPKPKDTLYITREPEVTCVVVDVSHEDPEVKFNWYVDGVEVHNAKTKPREEQYGSTYRVVSVLTVLHQDWLNGKEYKCKVSNKALPAPIEKTISKAKGQPREPQVYTLPPSRDELTKNQVSLTCLVKGFYPSDIAVEWESNGQPENNYKTTPPVLDSDGSFFLYSKLTVDKSRWQQGNVFSCSVMHEALHNHYTQKSLSLSPG

SEQ ID NO: 574 - protein, 452 aa, artificial
  Synthetic polypeptide
ELQLQESGPGLVKPSETLSLTCTVSGGSITASNYYWGWIRQPPGKGLEWIGSIDYTGSTYYEPSLKSRVTISVDTSKNQFSLKLSSVTAADTAVYYCATGNYYETYLGFDVWGQGTLVTVSSASTKGPSVFPLAPSSKSTSGGTAALGCLVKDYFPEPVTVSWNSGALTSGVHTFPAVLQSSGLYSLSSVVTVPSSSLGTQTYICNVNHKPSNTKVDKKVEPKSCDKTHTCPPCPAPELLGGPSVFLFPPKPKDTLYITREPEVTCVVVDVSHEDPEVKFNWYVDGVEVHNAKTKPREEQYGSTYRVVSVLTVLHQDWLNGKEYKCKVSNKALPAPIEKTISKAKGQPREPQVYTLPPSRDELTKNQVSLTCLVKGFYPSDIAVEWESNGQPENNYKTTPPVLDSDGSFFLYSKLTVDKSRWQQGNVFSCSVMHEALHNHYTQKSLSLSPGK

SEQ ID NO: 575 - protein, 452 aa, artificial
  Synthetic polypeptide
ELQLQESGPGLVKPSETLSLTCTVSGGSITASNYYWGWIRQPPGKGLEWIGSIDYTGSTYYEPSLKSRVTISVDTSKNQFSLKLSSVTAADTAVYYCATGNYYETYLGFDVWGQGTLVTVSSASTKGPSVFPLAPSSKSTSGGTAALGCLVKDYFPEPVTVSWNSGALTSGVHTFPAVLQSSGLYSLSSVVTVPSSSLGTQTYICNVNHKPSNTKVDKKVEPKSCDKTHTCPPCPAPELLGGPSVFLFPPKPKDTLMISRTPEVTCVVVDVSHEDPEVKFNWYVDGVEVHNAKTKPREEQYGSTYRVVSVLTVLHQDWLNGKEYKCKVSNKALPAPIEKTISKAKGQPREPQVYTLPPSRDELTKNQVSLWCLVKGFYPSDIAVEWESNGQPENNYKTTPPVLDSDGSFFLYSKLTVDKSRWQQGNVFSCSVMHEALHNHYTQKSLSLSPGK

SEQ ID NO: 576 - protein, 451 aa, artificial
  Synthetic polypeptide
ELQLQESGPGLVKPSETLSLTCTVSGGSITASNYYWGWIRQPPGKGLEWIGSIDYTGSTYYEPSLKSRVTISVDTSKNQFSLKLSSVTAADTAVYYCATGNYYETYLGFDVWGQGTLVTVSSASTKGPSVFPLAPSSKSTSGGTAALGCLVKDYFPEPVTVSWNSGALTSGVHTFPAVLQSSGLYSLSSVVTVPSSSLGTQTYICNVNHKPSNTKVDKKVEPKSCDKTHTCPPCPAPELLGGPSVFLFPPKPKDTLYITREPEVTCVVVDVSHEDPEVKFNWYVDGVEVHNAKTKPREEQYGSTYRVVSVLTVLHQDWLNGKEYKCKVSNKALPAPIEKTISKAKGQPREPQVYTLPPSRDELTKNQVSLWCLVKGFYPSDIAVEWESNGQPENNYKTTPPVLDSDGSFFLYSKLTVDKSRWQQGNVFSCSVMHEALHNHYTQKSLSLSPG

SEQ ID NO: 577 - protein, 452 aa, artificial
  Synthetic polypeptide
ELQLQESGPGLVKPSETLSLTCTVSGGSITASNYYWGWIRQPPGKGLEWIGSIDYTGSTYYEPSLKSRVTISVDTSKNQFSLKLSSVTAADTAVYYCATGNYYETYLGFDVWGQGTLVTVSSASTKGPSVFPLAPSSKSTSGGTAALGCLVKDYFPEPVTVSWNSGALTSGVHTFPAVLQSSGLYSLSSVVTVPSSSLGTQTYICNVNHKPSNTKVDKKVEPKSCDKTHTCPPCPAPELLGGPSVFLFPPKPKDTLYITREPEVTCVVVDVSHEDPEVKFNWYVDGVEVHNAKTKPREEQYGSTYRVVSVLTVLHQDWLNGKEYKCKVSNKALPAPIEKTISKAKGQPREPQVYTLPPSRDELTKNQVSLWCLVKGFYPSDIAVEWESNGQPENNYKTTPPVLDSDGSFFLYSKLTVDKSRWQQGNVFSCSVMHEALHNHYTQKSLSLSPGK

SEQ ID NO: 578 - protein, 452 aa, artificial
  Synthetic polypeptide
ELQLQESGPGLVKPSETLSLTCTVSGGSITASNYYWGWIRQPPGKGLEWIGSIDYTGSTYYEPSLKSRVTISVDTSKNQFSLKLSSVTAADTAVYYCATGNYYETYLGFDVWGQGTLVTVSSASTKGPSVFPLAPSSKSTSGGTAALGCLVKDYFPEPVTVSWNSGALTSGVHTFPAVLQSSGLYSLSSVVTVPSSSLGTQTYICNVNHKPSNTKVDKKVEPKSCDKTHTCPPCPAPELLGGPSVFLFPPKPKDTLMISRTPEVTCVVVDVSHEDPEVKFNWYVDGVEVHNAKTKPREEQYGSTYRVVSVLTVLHQDWLNGKEYKCKVSNKALPAPIEKTISKAKGQPREPQVYTLPPSRDELTKNQVSLSCAVKGFYPSDIAVEWESNGQPENNYKTTPPVLDSDGSFFLVSKLTVDKSRWQQGNVFSCSVMHEALHNHYTQKSLSLSPGK

SEQ ID NO: 579 - protein, 451 aa, artificial
  Synthetic polypeptide
ELQLQESGPGLVKPSETLSLTCTVSGGSITASNYYWGWIRQPPGKGLEWIGSIDYTGSTYYEPSLKSRVTISVDTSKNQFSLKLSSVTAADTAVYYCATGNYYETYLGFDVWGQGTLVTVSSASTKGPSVFPLAPSSKSTSGGTAALGCLVKDYFPEPVTVSWNSGALTSGVHTFPAVLQSSGLYSLSSVVTVPSSSLGTQTYICNVNHKPSNTKVDKKVEPKSCDKTHTCPPCPAPELLGGPSVFLFPPKPKDTLYITREPEVTCVVVDVSHEDPEVKFNWYVDGVEVHNAKTKPREEQYGSTYRVVSVLTVLHQDWLNGKEYKCKVSNKALPAPIEKTISKAKGQPREPQVYTLPPSRDELTKNQVSLSCAVKGFYPSDIAVEWESNGQPENNYKTTPPVLDSDGSFFLVSKLTVDKSRWQQGNVFSCSVMHEALHNHYTQKSLSLSPG

SEQ ID NO: 580 - protein, 452 aa, artificial
  Synthetic polypeptide
ELQLQESGPGLVKPSETLSLTCTVSGGSITASNYYWGWIRQPPGKGLEWIGSIDYTGSTYYEPSLKSRVTISVDTSKNQFSLKLSSVTAADTAVYYCATGNYYETYLGFDVWGQGTLVTVSSASTKGPSVFPLAPSSKSTSGGTAALGCLVKDYFPEPVTVSWNSGALTSGVHTFPAVLQSSGLYSLSSVVTVPSSSLGTQTYICNVNHKPSNTKVDKKVEPKSCDKTHTCPPCPAPELLGGPSVFLFPPKPKDTLYITREPEVTCVVVDVSHEDPEVKFNWYVDGVEVHNAKTKPREEQYGSTYRVVSVLTVLHQDWLNGKEYKCKVSNKALPAPIEKTISKAKGQPREPQVYTLPPSRDELTKNQVSLSCAVKGFYPSDIAVEWESNGQPENNYKTTPPVLDSDGSFFLVSKLTVDKSRWQQGNVFSCSVMHEALHNHYTQKSLSLSPGK

SEQ ID NO: 581 - protein, 452 aa, artificial
  Synthetic polypeptide
ELQLQESGPGLVKPSETLSLTCTVSGGSITASNTYWGWIRQPPGKGLEWIGSIDYTGSTYYNPSLKSRVTISVDTSKNQFSLKLSSVTAADTAVYYCATGKYYETYLGFDVWGQGTLVTVSSASTKGPSVFPLAPSSKSTSGGTAALGCLVKDYFPEPVTVSWNSGALTSGVHTFPAVLQSSGLYSLSSVVTVPSSSLGTQTYICNVNHKPSNTKVDKKVEPKSCDKTHTCPPCPAPELLGGPSVFLFPPKPKDTLMISRTPEVTCVVVDVSHEDPEVKFNWYVDGVEVHNAKTKPREEQYGSTYRVVSVLTVLHQDWLNGKEYKCKVSNKALPAPIEKTISKAKGQPREPQVYTLPPSRDELTKNQVSLTCLVKGFYPSDIAVEWESNGQPENNYKTTPPVLDSDGSFFLYSKLTVDKSRWQQGNVFSCSVMHEALHNHYTQKSLSLSPGK

SEQ ID NO: 582 - protein, 451 aa, artificial
  Synthetic polypeptide
ELQLQESGPGLVKPSETLSLTCTVSGGSITASNTYWGWIRQPPGKGLEWIGSIDYTGSTYYNPSLKSRVTISVDTSKNQFSLKLSSVTAADTAVYYCATGKYYETYLGFDVWGQGTLVTVSSASTKGPSVFPLAPSSKSTSGGTAALGCLVKDYFPEPVTVSWNSGALTSGVHTFPAVLQSSGLYSLSSVVTVPSSSLGTQTYICNVNHKPSNTKVDKKVEPKSCDKTHTCPPCPAPELLGGPSVFLFPPKPKDTLYITREPEVTCVVVDVSHEDPEVKFNWYVDGVEVHNAKTKPREEQYGSTYRVVSVLTVLHQDWLNGKEYKCKVSNKALPAPIEKTISKAKGQPREPQVYTLPPSRDELTKNQVSLTCLVKGFYPSDIAVEWESNGQPENNYKTTPPVLDSDGSFFLYSKLTVDKSRWQQGNVFSCSVMHEALHNHYTQKSLSLSPG

SEQ ID NO: 583 - protein, 452 aa, artificial
  Synthetic polypeptide
ELQLQESGPGLVKPSETLSLTCTVSGGSITASNTYWGWIRQPPGKGLEWIGSIDYTGSTYYNPSLKSRVTISVDTSKNQFSLKLSSVTAADTAVYYCATGKYYETYLGFDVWGQGTLVTVSSASTKGPSVFPLAPSSKSTSGGTAALGCLVKDYFPEPVTVSWNSGALTSGVHTFPAVLQSSGLYSLSSVVTVPSSSLGTQTYICNVNHKPSNTKVDKKVEPKSCDKTHTCPPCPAPELLGGPSVFLFPPKPKDTLYITREPEVTCVVVDVSHEDPEVKFNWYVDGVEVHNAKTKPREEQYGSTYRVVSVLTVLHQDWLNGKEYKCKVSNKALPAPIEKTISKAKGQPREPQVYTLPPSRDELTKNQVSLTCLVKGFYPSDIAVEWESNGQPENNYKTTPPVLDSDGSFFLYSKLTVDKSRWQQGNVFSCSVMHEALHNHYTQKSLSLSPGK

SEQ ID NO: 584 - protein, 452 aa, artificial
  Synthetic polypeptide
ELQLQESGPGLVKPSETLSLTCTVSGGSITASNTYWGWIRQPPGKGLEWIGSIDYTGSTYYNPSLKSRVTISVDTSKNQFSLKLSSVTAADTAVYYCATGKYYETYLGFDVWGQGTLVTVSSASTKGPSVFPLAPSSKSTSGGTAALGCLVKDYFPEPVTVSWNSGALTSGVHTFPAVLQSSGLYSLSSVVTVPSSSLGTQTYICNVNHKPSNTKVDKKVEPKSCDKTHTCPPCPAPELLGGPSVFLFPPKPKDTLMISRTPEVTCVVVDVSHEDPEVKFNWYVDGVEVHNAKTKPREEQYGSTYRVVSVLTVLHQDWLNGKEYKCKVSNKALPAPIEKTISKAKGQPREPQVYTLPPSRDELTKNQVSLWCLVKGFYPSDIAVEWESNGQPENNYKTTPPVLDSDGSFFLYSKLTVDKSRWQQGNVFSCSVMHEALHNHYTQKSLSLSPGK

SEQ ID NO: 585 - protein, 451 aa, artificial
  Synthetic polypeptide
ELQLQESGPGLVKPSETLSLTCTVSGGSITASNTYWGWIRQPPGKGLEWIGSIDYTGSTYYNPSLKSRVTISVDTSKNQFSLKLSSVTAADTAVYYCATGKYYETYLGFDVWGQGTLVTVSSASTKGPSVFPLAPSSKSTSGGTAALGCLVKDYFPEPVTVSWNSGALTSGVHTFPAVLQSSGLYSLSSVVTVPSSSLGTQTYICNVNHKPSNTKVDKKVEPKSCDKTHTCPPCPAPELLGGPSVFLFPPKPKDTLYITREPEVTCVVVDVSHEDPEVKFNWYVDGVEVHNAKTKPREEQYGSTYRVVSVLTVLHQDWLNGKEYKCKVSNKALPAPIEKTISKAKGQPREPQVYTLPPSRDELTKNQVSLWCLVKGFYPSDIAVEWESNGQPENNYKTTPPVLDSDGSFFLYSKLTVDKSRWQQGNVFSCSVMHEALHNHYTQKSLSLSPG

SEQ ID NO: 586 - protein, 452 aa, artificial
  Synthetic polypeptide
ELQLQESGPGLVKPSETLSLTCTVSGGSITASNTYWGWIRQPPGKGLEWIGSIDYTGSTYYNPSLKSRVTISVDTSKNQFSLKLSSVTAADTAVYYCATGKYYETYLGFDVWGQGTLVTVSSASTKGPSVFPLAPSSKSTSGGTAALGCLVKDYFPEPVTVSWNSGALTSGVHTFPAVLQSSGLYSLSSVVTVPSSSLGTQTYICNVNHKPSNTKVDKKVEPKSCDKTHTCPPCPAPELLGGPSVFLFPPKPKDTLYITREPEVTCVVVDVSHEDPEVKFNWYVDGVEVHNAKTKPREEQYGSTYRVVSVLTVLHQDWLNGKEYKCKVSNKALPAPIEKTISKAKGQPREPQVYTLPPSRDELTKNQVSLWCLVKGFYPSDIAVEWESNGQPENNYKTTPPVLDSDGSFFLYSKLTVDKSRWQQGNVFSCSVMHEALHNHYTQKSLSLSPGK

SEQ ID NO: 587 - protein, 452 aa, artificial
  Synthetic polypeptide
ELQLQESGPGLVKPSETLSLTCTVSGGSITASNTYWGWIRQPPGKGLEWIGSIDYTGSTYYNPSLKSRVTISVDTSKNQFSLKLSSVTAADTAVYYCATGKYYETYLGFDVWGQGTLVTVSSASTKGPSVFPLAPSSKSTSGGTAALGCLVKDYFPEPVTVSWNSGALTSGVHTFPAVLQSSGLYSLSSVVTVPSSSLGTQTYICNVNHKPSNTKVDKKVEPKSCDKTHTCPPCPAPELLGGPSVFLFPPKPKDTLMISRTPEVTCVVVDVSHEDPEVKFNWYVDGVEVHNAKTKPREEQYGSTYRVVSVLTVLHQDWLNGKEYKCKVSNKALPAPIEKTISKAKGQPREPQVYTLPPSRDELTKNQVSLSCAVKGFYPSDIAVEWESNGQPENNYKTTPPVLDSDGSFFLVSKLTVDKSRWQQGNVFSCSVMHEALHNHYTQKSLSLSPGK

SEQ ID NO: 588 - protein, 451 aa, artificial
  Synthetic polypeptide
ELQLQESGPGLVKPSETLSLTCTVSGGSITASNTYWGWIRQPPGKGLEWIGSIDYTGSTYYNPSLKSRVTISVDTSKNQFSLKLSSVTAADTAVYYCATGKYYETYLGFDVWGQGTLVTVSSASTKGPSVFPLAPSSKSTSGGTAALGCLVKDYFPEPVTVSWNSGALTSGVHTFPAVLQSSGLYSLSSVVTVPSSSLGTQTYICNVNHKPSNTKVDKKVEPKSCDKTHTCPPCPAPELLGGPSVFLFPPKPKDTLYITREPEVTCVVVDVSHEDPEVKFNWYVDGVEVHNAKTKPREEQYGSTYRVVSVLTVLHQDWLNGKEYKCKVSNKALPAPIEKTISKAKGQPREPQVYTLPPSRDELTKNQVSLSCAVKGFYPSDIAVEWESNGQPENNYKTTPPVLDSDGSFFLVSKLTVDKSRWQQGNVFSCSVMHEALHNHYTQKSLSLSPG

SEQ ID NO: 589 - protein, 452 aa, artificial
  Synthetic polypeptide
ELQLQESGPGLVKPSETLSLTCTVSGGSITASNTYWGWIRQPPGKGLEWIGSIDYTGSTYYNPSLKSRVTISVDTSKNQFSLKLSSVTAADTAVYYCATGKYYETYLGFDVWGQGTLVTVSSASTKGPSVFPLAPSSKSTSGGTAALGCLVKDYFPEPVTVSWNSGALTSGVHTFPAVLQSSGLYSLSSVVTVPSSSLGTQTYICNVNHKPSNTKVDKKVEPKSCDKTHTCPPCPAPELLGGPSVFLFPPKPKDTLYITREPEVTCVVVDVSHEDPEVKFNWYVDGVEVHNAKTKPREEQYGSTYRVVSVLTVLHQDWLNGKEYKCKVSNKALPAPIEKTISKAKGQPREPQVYTLPPSRDELTKNQVSLSCAVKGFYPSDIAVEWESNGQPENNYKTTPPVLDSDGSFFLVSKLTVDKSRWQQGNVFSCSVMHEALHNHYTQKSLSLSPGK

SEQ ID NO: 590 - protein, 452 aa, artificial
  Synthetic polypeptide
ELQLQESGPGLVKPSETLSLTCTVSGGSITASNYYWGWIRQPPGKGLEWIGSIDYTGSTYYNPSLKSRVTISVDTSKNQFSLKLSSVTAADTAVYYCASGKYYETYLGFDVWGQGTLVTVSSASTKGPSVFPLAPSSKSTSGGTAALGCLVKDYFPEPVTVSWNSGALTSGVHTFPAVLQSSGLYSLSSVVTVPSSSLGTQTYICNVNHKPSNTKVDKKVEPKSCDKTHTCPPCPAPELLGGPSVFLFPPKPKDTLMISRTPEVTCVVVDVSHEDPEVKFNWYVDGVEVHNAKTKPREEQYGSTYRVVSVLTVLHQDWLNGKEYKCKVSNKALPAPIEKTISKAKGQPREPQVYTLPPSRDELTKNQVSLTCLVKGFYPSDIAVEWESNGQPENNYKTTPPVLDSDGSFFLYSKLTVDKSRWQQGNVFSCSVMHEALHNHYTQKSLSLSPGK

SEQ ID NO: 591 - protein, 451 aa, artificial
  Synthetic polypeptide
ELQLQESGPGLVKPSETLSLTCTVSGGSITASNYYWGWIRQPPGKGLEWIGSIDYTGSTYYNPSLKSRVTISVDTSKNQFSLKLSSVTAADTAVYYCASGKYYETYLGFDVWGQGTLVTVSSASTKGPSVFPLAPSSKSTSGGTAALGCLVKDYFPEPVTVSWNSGALTSGVHTFPAVLQSSGLYSLSSVVTVPSSSLGTQTYICNVNHKPSNTKVDKKVEPKSCDKTHTCPPCPAPELLGGPSVFLFPPKPKDTLYITREPEVTCVVVDVSHEDPEVKFNWYVDGVEVHNAKTKPREEQYGSTYRVVSVLTVLHQDWLNGKEYKCKVSNKALPAPIEKTISKAKGQPREPQVYTLPPSRDELTKNQVSLTCLVKGFYPSDIAVEWESNGQPENNYKTTPPVLDSDGSFFLYSKLTVDKSRWQQGNVFSCSVMHEALHNHYTQKSLSLSPG

SEQ ID NO: 592 - protein, 452 aa, artificial
  Synthetic polypeptide
ELQLQESGPGLVKPSETLSLTCTVSGGSITASNYYWGWIRQPPGKGLEWIGSIDYTGSTYYNPSLKSRVTISVDTSKNQFSLKLSSVTAADTAVYYCASGKYYETYLGFDVWGQGTLVTVSSASTKGPSVFPLAPSSKSTSGGTAALGCLVKDYFPEPVTVSWNSGALTSGVHTFPAVLQSSGLYSLSSVVTVPSSSLGTQTYICNVNHKPSNTKVDKKVEPKSCDKTHTCPPCPAPELLGGPSVFLFPPKPKDTLYITREPEVTCVVVDVSHEDPEVKFNWYVDGVEVHNAKTKPREEQYGSTYRVVSVLTVLHQDWLNGKEYKCKVSNKALPAPIEKTISKAKGQPREPQVYTLPPSRDELTKNQVSLTCLVKGFYPSDIAVEWESNGQPENNYKTTPPVLDSDGSFFLYSKLTVDKSRWQQGNVFSCSVMHEALHNHYTQKSLSLSPGK

SEQ ID NO: 593 - protein, 452 aa, artificial
  Synthetic polypeptide
ELQLQESGPGLVKPSETLSLTCTVSGGSITASNYYWGWIRQPPGKGLEWIGSIDYTGSTYYNPSLKSRVTISVDTSKNQFSLKLSSVTAADTAVYYCASGKYYETYLGFDVWGQGTLVTVSSASTKGPSVFPLAPSSKSTSGGTAALGCLVKDYFPEPVTVSWNSGALTSGVHTFPAVLQSSGLYSLSSVVTVPSSSLGTQTYICNVNHKPSNTKVDKKVEPKSCDKTHTCPPCPAPELLGGPSVFLFPPKPKDTLMISRTPEVTCVVVDVSHEDPEVKFNWYVDGVEVHNAKTKPREEQYGSTYRVVSVLTVLHQDWLNGKEYKCKVSNKALPAPIEKTISKAKGQPREPQVYTLPPSRDELTKNQVSLWCLVKGFYPSDIAVEWESNGQPENNYKTTPPVLDSDGSFFLYSKLTVDKSRWQQGNVFSCSVMHEALHNHYTQKSLSLSPGK

SEQ ID NO: 594 - protein, 451 aa, artificial
  Synthetic polypeptide
ELQLQESGPGLVKPSETLSLTCTVSGGSITASNYYWGWIRQPPGKGLEWIGSIDYTGSTYYNPSLKSRVTISVDTSKNQFSLKLSSVTAADTAVYYCASGKYYETYLGFDVWGQGTLVTVSSASTKGPSVFPLAPSSKSTSGGTAALGCLVKDYFPEPVTVSWNSGALTSGVHTFPAVLQSSGLYSLSSVVTVPSSSLGTQTYICNVNHKPSNTKVDKKVEPKSCDKTHTCPPCPAPELLGGPSVFLFPPKPKDTLYITREPEVTCVVVDVSHEDPEVKFNWYVDGVEVHNAKTKPREEQYGSTYRVVSVLTVLHQDWLNGKEYKCKVSNKALPAPIEKTISKAKGQPREPQVYTLPPSRDELTKNQVSLWCLVKGFYPSDIAVEWESNGQPENNYKTTPPVLDSDGSFFLYSKLTVDKSRWQQGNVFSCSVMHEALHNHYTQKSLSLSPG

SEQ ID NO: 595 - protein, 452 aa, artificial
  Synthetic polypeptide
ELQLQESGPGLVKPSETLSLTCTVSGGSITASNYYWGWIRQPPGKGLEWIGSIDYTGSTYYNPSLKSRVTISVDTSKNQFSLKLSSVTAADTAVYYCASGKYYETYLGFDVWGQGTLVTVSSASTKGPSVFPLAPSSKSTSGGTAALGCLVKDYFPEPVTVSWNSGALTSGVHTFPAVLQSSGLYSLSSVVTVPSSSLGTQTYICNVNHKPSNTKVDKKVEPKSCDKTHTCPPCPAPELLGGPSVFLFPPKPKDTLYITREPEVTCVVVDVSHEDPEVKFNWYVDGVEVHNAKTKPREEQYGSTYRVVSVLTVLHQDWLNGKEYKCKVSNKALPAPIEKTISKAKGQPREPQVYTLPPSRDELTKNQVSLWCLVKGFYPSDIAVEWESNGQPENNYKTTPPVLDSDGSFFLYSKLTVDKSRWQQGNVFSCSVMHEALHNHYTQKSLSLSPGK

SEQ ID NO: 596 - protein, 452 aa, artificial
  Synthetic polypeptide
ELQLQESGPGLVKPSETLSLTCTVSGGSITASNYYWGWIRQPPGKGLEWIGSIDYTGSTYYNPSLKSRVTISVDTSKNQFSLKLSSVTAADTAVYYCASGKYYETYLGFDVWGQGTLVTVSSASTKGPSVFPLAPSSKSTSGGTAALGCLVKDYFPEPVTVSWNSGALTSGVHTFPAVLQSSGLYSLSSVVTVPSSSLGTQTYICNVNHKPSNTKVDKKVEPKSCDKTHTCPPCPAPELLGGPSVFLFPPKPKDTLMISRTPEVTCVVVDVSHEDPEVKFNWYVDGVEVHNAKTKPREEQYGSTYRVVSVLTVLHQDWLNGKEYKCKVSNKALPAPIEKTISKAKGQPREPQVYTLPPSRDELTKNQVSLSCAVKGFYPSDIAVEWESNGQPENNYKTTPPVLDSDGSFFLVSKLTVDKSRWQQGNVFSCSVMHEALHNHYTQKSLSLSPGK

SEQ ID NO: 597 - protein, 451 aa, artificial
  Synthetic polypeptide
ELQLQESGPGLVKPSETLSLTCTVSGGSITASNYYWGWIRQPPGKGLEWIGSIDYTGSTYYNPSLKSRVTISVDTSKNQFSLKLSSVTAADTAVYYCASGKYYETYLGFDVWGQGTLVTVSSASTKGPSVFPLAPSSKSTSGGTAALGCLVKDYFPEPVTVSWNSGALTSGVHTFPAVLQSSGLYSLSSVVTVPSSSLGTQTYICNVNHKPSNTKVDKKVEPKSCDKTHTCPPCPAPELLGGPSVFLFPPKPKDTLYITREPEVTCVVVDVSHEDPEVKFNWYVDGVEVHNAKTKPREEQYGSTYRVVSVLTVLHQDWLNGKEYKCKVSNKALPAPIEKTISKAKGQPREPQVYTLPPSRDELTKNQVSLSCAVKGFYPSDIAVEWESNGQPENNYKTTPPVLDSDGSFFLVSKLTVDKSRWQQGNVFSCSVMHEALHNHYTQKSLSLSPG

SEQ ID NO: 598 - protein, 452 aa, artificial
  Synthetic polypeptide
ELQLQESGPGLVKPSETLSLTCTVSGGSITASNYYWGWIRQPPGKGLEWIGSIDYTGSTYYNPSLKSRVTISVDTSKNQFSLKLSSVTAADTAVYYCASGKYYETYLGFDVWGQGTLVTVSSASTKGPSVFPLAPSSKSTSGGTAALGCLVKDYFPEPVTVSWNSGALTSGVHTFPAVLQSSGLYSLSSVVTVPSSSLGTQTYICNVNHKPSNTKVDKKVEPKSCDKTHTCPPCPAPELLGGPSVFLFPPKPKDTLYITREPEVTCVVVDVSHEDPEVKFNWYVDGVEVHNAKTKPREEQYGSTYRVVSVLTVLHQDWLNGKEYKCKVSNKALPAPIEKTISKAKGQPREPQVYTLPPSRDELTKNQVSLSCAVKGFYPSDIAVEWESNGQPENNYKTTPPVLDSDGSFFLVSKLTVDKSRWQQGNVFSCSVMHEALHNHYTQKSLSLSPGK

SEQ ID NO: 599 - protein, 452 aa, artificial
  Synthetic polypeptide
ELQLQESGPGLVKPSETLSLTCTVSGGSITSSNYYWGWIRQPPGKGLEWIGSIDYTGSTYYNPSLKSRVTISVDTSKNQFSLKLSSVTAADTAVYYCATGKYYETYLGFDVWGQGTLVTVSSASTKGPSVFPLAPSSKSTSGGTAALGCLVKDYFPEPVTVSWNSGALTSGVHTFPAVLQSSGLYSLSSVVTVPSSSLGTQTYICNVNHKPSNTKVDKKVEPKSCDKTHTCPPCPAPELLGGPSVFLFPPKPKDTLMISRTPEVTCVVVDVSHEDPEVKFNWYVDGVEVHNAKTKPREEQYGSTYRVVSVLTVLHQDWLNGKEYKCKVSNKALPAPIEKTISKAKGQPREPQVYTLPPSRDELTKNQVSLTCLVKGFYPSDIAVEWESNGQPENNYKTTPPVLDSDGSFFLYSKLTVDKSRWQQGNVFSCSVMHEALHNHYTQKSLSLSPGK

SEQ ID NO: 600 - protein, 451 aa, artificial
  Synthetic polypeptide
ELQLQESGPGLVKPSETLSLTCTVSGGSITSSNYYWGWIRQPPGKGLEWIGSIDYTGSTYYNPSLKSRVTISVDTSKNQFSLKLSSVTAADTAVYYCATGKYYETYLGFDVWGQGTLVTVSSASTKGPSVFPLAPSSKSTSGGTAALGCLVKDYFPEPVTVSWNSGALTSGVHTFPAVLQSSGLYSLSSVVTVPSSSLGTQTYICNVNHKPSNTKVDKKVEPKSCDKTHTCPPCPAPELLGGPSVFLFPPKPKDTLYITREPEVTCVVVDVSHEDPEVKFNWYVDGVEVHNAKTKPREEQYGSTYRVVSVLTVLHQDWLNGKEYKCKVSNKALPAPIEKTISKAKGQPREPQVYTLPPSRDELTKNQVSLTCLVKGFYPSDIAVEWESNGQPENNYKTTPPVLDSDGSFFLYSKLTVDKSRWQQGNVFSCSVMHEALHNHYTQKSLSLSPG

SEQ ID NO: 601 - protein, 452 aa, artificial
  Synthetic polypeptide
ELQLQESGPGLVKPSETLSLTCTVSGGSITSSNYYWGWIRQPPGKGLEWIGSIDYTGSTYYNPSLKSRVTISVDTSKNQFSLKLSSVTAADTAVYYCATGKYYETYLGFDVWGQGTLVTVSSASTKGPSVFPLAPSSKSTSGGTAALGCLVKDYFPEPVTVSWNSGALTSGVHTFPAVLQSSGLYSLSSVVTVPSSSLGTQTYICNVNHKPSNTKVDKKVEPKSCDKTHTCPPCPAPELLGGPSVFLFPPKPKDTLYITREPEVTCVVVDVSHEDPEVKFNWYVDGVEVHNAKTKPREEQYGSTYRVVSVLTVLHQDWLNGKEYKCKVSNKALPAPIEKTISKAKGQPREPQVYTLPPSRDELTKNQVSLTCLVKGFYPSDIAVEWESNGQPENNYKTTPPVLDSDGSFFLYSKLTVDKSRWQQGNVFSCSVMHEALHNHYTQKSLSLSPGK

SEQ ID NO: 602 - protein, 452 aa, artificial
  Synthetic polypeptide
ELQLQESGPGLVKPSETLSLTCTVSGGSITSSNYYWGWIRQPPGKGLEWIGSIDYTGSTYYNPSLKSRVTISVDTSKNQFSLKLSSVTAADTAVYYCATGKYYETYLGFDVWGQGTLVTVSSASTKGPSVFPLAPSSKSTSGGTAALGCLVKDYFPEPVTVSWNSGALTSGVHTFPAVLQSSGLYSLSSVVTVPSSSLGTQTYICNVNHKPSNTKVDKKVEPKSCDKTHTCPPCPAPELLGGPSVFLFPPKPKDTLMISRTPEVTCVVVDVSHEDPEVKFNWYVDGVEVHNAKTKPREEQYGSTYRVVSVLTVLHQDWLNGKEYKCKVSNKALPAPIEKTISKAKGQPREPQVYTLPPSRDELTKNQVSLWCLVKGFYPSDIAVEWESNGQPENNYKTTPPVLDSDGSFFLYSKLTVDKSRWQQGNVFSCSVMHEALHNHYTQKSLSLSPGK

SEQ ID NO: 603 - protein, 451 aa, artificial
  Synthetic polypeptide
ELQLQESGPGLVKPSETLSLTCTVSGGSITSSNYYWGWIRQPPGKGLEWIGSIDYTGSTYYNPSLKSRVTISVDTSKNQFSLKLSSVTAADTAVYYCATGKYYETYLGFDVWGQGTLVTVSSASTKGPSVFPLAPSSKSTSGGTAALGCLVKDYFPEPVTVSWNSGALTSGVHTFPAVLQSSGLYSLSSVVTVPSSSLGTQTYICNVNHKPSNTKVDKKVEPKSCDKTHTCPPCPAPELLGGPSVFLFPPKPKDTLYITREPEVTCVVVDVSHEDPEVKFNWYVDGVEVHNAKTKPREEQYGSTYRVVSVLTVLHQDWLNGKEYKCKVSNKALPAPIEKTISKAKGQPREPQVYTLPPSRDELTKNQVSLWCLVKGFYPSDIAVEWESNGQPENNYKTTPPVLDSDGSFFLYSKLTVDKSRWQQGNVFSCSVMHEALHNHYTQKSLSLSPG

SEQ ID NO: 604 - protein, 452 aa, artificial
  Synthetic polypeptide
ELQLQESGPGLVKPSETLSLTCTVSGGSITSSNYYWGWIRQPPGKGLEWIGSIDYTGSTYYNPSLKSRVTISVDTSKNQFSLKLSSVTAADTAVYYCATGKYYETYLGFDVWGQGTLVTVSSASTKGPSVFPLAPSSKSTSGGTAALGCLVKDYFPEPVTVSWNSGALTSGVHTFPAVLQSSGLYSLSSVVTVPSSSLGTQTYICNVNHKPSNTKVDKKVEPKSCDKTHTCPPCPAPELLGGPSVFLFPPKPKDTLYITREPEVTCVVVDVSHEDPEVKFNWYVDGVEVHNAKTKPREEQYGSTYRVVSVLTVLHQDWLNGKEYKCKVSNKALPAPIEKTISKAKGQPREPQVYTLPPSRDELTKNQVSLWCLVKGFYPSDIAVEWESNGQPENNYKTTPPVLDSDGSFFLYSKLTVDKSRWQQGNVFSCSVMHEALHNHYTQKSLSLSPGK

SEQ ID NO: 605 - protein, 452 aa, artificial
  Synthetic polypeptide
ELQLQESGPGLVKPSETLSLTCTVSGGSITSSNYYWGWIRQPPGKGLEWIGSIDYTGSTYYNPSLKSRVTISVDTSKNQFSLKLSSVTAADTAVYYCATGKYYETYLGFDVWGQGTLVTVSSASTKGPSVFPLAPSSKSTSGGTAALGCLVKDYFPEPVTVSWNSGALTSGVHTFPAVLQSSGLYSLSSVVTVPSSSLGTQTYICNVNHKPSNTKVDKKVEPKSCDKTHTCPPCPAPELLGGPSVFLFPPKPKDTLMISRTPEVTCVVVDVSHEDPEVKFNWYVDGVEVHNAKTKPREEQYGSTYRVVSVLTVLHQDWLNGKEYKCKVSNKALPAPIEKTISKAKGQPREPQVYTLPPSRDELTKNQVSLSCAVKGFYPSDIAVEWESNGQPENNYKTTPPVLDSDGSFFLVSKLTVDKSRWQQGNVFSCSVMHEALHNHYTQKSLSLSPGK

SEQ ID NO: 606 - protein, 451 aa, artificial
  Synthetic polypeptide
ELQLQESGPGLVKPSETLSLTCTVSGGSITSSNYYWGWIRQPPGKGLEWIGSIDYTGSTYYNPSLKSRVTISVDTSKNQFSLKLSSVTAADTAVYYCATGKYYETYLGFDVWGQGTLVTVSSASTKGPSVFPLAPSSKSTSGGTAALGCLVKDYFPEPVTVSWNSGALTSGVHTFPAVLQSSGLYSLSSVVTVPSSSLGTQTYICNVNHKPSNTKVDKKVEPKSCDKTHTCPPCPAPELLGGPSVFLFPPKPKDTLYITREPEVTCVVVDVSHEDPEVKFNWYVDGVEVHNAKTKPREEQYGSTYRVVSVLTVLHQDWLNGKEYKCKVSNKALPAPIEKTISKAKGQPREPQVYTLPPSRDELTKNQVSLSCAVKGFYPSDIAVEWESNGQPENNYKTTPPVLDSDGSFFLVSKLTVDKSRWQQGNVFSCSVMHEALHNHYTQKSLSLSPG

SEQ ID NO: 607 - protein, 452 aa, artificial
  Synthetic polypeptide
ELQLQESGPGLVKPSETLSLTCTVSGGSITSSNYYWGWIRQPPGKGLEWIGSIDYTGSTYYNPSLKSRVTISVDTSKNQFSLKLSSVTAADTAVYYCATGKYYETYLGFDVWGQGTLVTVSSASTKGPSVFPLAPSSKSTSGGTAALGCLVKDYFPEPVTVSWNSGALTSGVHTFPAVLQSSGLYSLSSVVTVPSSSLGTQTYICNVNHKPSNTKVDKKVEPKSCDKTHTCPPCPAPELLGGPSVFLFPPKPKDTLYITREPEVTCVVVDVSHEDPEVKFNWYVDGVEVHNAKTKPREEQYGSTYRVVSVLTVLHQDWLNGKEYKCKVSNKALPAPIEKTISKAKGQPREPQVYTLPPSRDELTKNQVSLSCAVKGFYPSDIAVEWESNGQPENNYKTTPPVLDSDGSFFLVSKLTVDKSRWQQGNVFSCSVMHEALHNHYTQKSLSLSPGK

SEQ ID NO: 608 - protein, 452 aa, artificial
  Synthetic polypeptide
ELQLQESGPGLVKPSETLSLTCTVSGGSITSSNYYWGWIRQPPGKGLEWIGSIDYTGSTYYQPSLKSRVTISVDTSKNQFSLKLSSVTAADTAVYYCARGNYYETYLGFDVWGQGTLVTVSSASTKGPSVFPLAPSSKSTSGGTAALGCLVKDYFPEPVTVSWNSGALTSGVHTFPAVLQSSGLYSLSSVVTVPSSSLGTQTYICNVNHKPSNTKVDKKVEPKSCDKTHTCPPCPAPELLGGPSVFLFPPKPKDTLMISRTPEVTCVVVDVSHEDPEVKFNWYVDGVEVHNAKTKPREEQYGSTYRVVSVLTVLHQDWLNGKEYKCKVSNKALPAPIEKTISKAKGQPREPQVYTLPPSRDELTKNQVSLTCLVKGFYPSDIAVEWESNGQPENNYKTTPPVLDSDGSFFLYSKLTVDKSRWQQGNVFSCSVMHEALHNHYTQKSLSLSPGK

SEQ ID NO: 609 - protein, 451 aa, artificial
  Synthetic polypeptide
ELQLQESGPGLVKPSETLSLTCTVSGGSITSSNYYWGWIRQPPGKGLEWIGSIDYTGSTYYQPSLKSRVTISVDTSKNQFSLKLSSVTAADTAVYYCARGNYYETYLGFDVWGQGTLVTVSSASTKGPSVFPLAPSSKSTSGGTAALGCLVKDYFPEPVTVSWNSGALTSGVHTFPAVLQSSGLYSLSSVVTVPSSSLGTQTYICNVNHKPSNTKVDKKVEPKSCDKTHTCPPCPAPELLGGPSVFLFPPKPKDTLYITREPEVTCVVVDVSHEDPEVKFNWYVDGVEVHNAKTKPREEQYGSTYRVVSVLTVLHQDWLNGKEYKCKVSNKALPAPIEKTISKAKGQPREPQVYTLPPSRDELTKNQVSLTCLVKGFYPSDIAVEWESNGQPENNYKTTPPVLDSDGSFFLYSKLTVDKSRWQQGNVFSCSVMHEALHNHYTQKSLSLSPG

SEQ ID NO: 610 - protein, 452 aa, artificial
  Synthetic polypeptide
ELQLQESGPGLVKPSETLSLTCTVSGGSITSSNYYWGWIRQPPGKGLEWIGSIDYTGSTYYQPSLKSRVTISVDTSKNQFSLKLSSVTAADTAVYYCARGNYYETYLGFDVWGQGTLVTVSSASTKGPSVFPLAPSSKSTSGGTAALGCLVKDYFPEPVTVSWNSGALTSGVHTFPAVLQSSGLYSLSSVVTVPSSSLGTQTYICNVNHKPSNTKVDKKVEPKSCDKTHTCPPCPAPELLGGPSVFLFPPKPKDTLYITREPEVTCVVVDVSHEDPEVKFNWYVDGVEVHNAKTKPREEQYGSTYRVVSVLTVLHQDWLNGKEYKCKVSNKALPAPIEKTISKAKGQPREPQVYTLPPSRDELTKNQVSLTCLVKGFYPSDIAVEWESNGQPENNYKTTPPVLDSDGSFFLYSKLTVDKSRWQQGNVFSCSVMHEALHNHYTQKSLSLSPGK

SEQ ID NO: 611 - protein, 452 aa, artificial
  Synthetic polypeptide
ELQLQESGPGLVKPSETLSLTCTVSGGSITSSNYYWGWIRQPPGKGLEWIGSIDYTGSTYYQPSLKSRVTISVDTSKNQFSLKLSSVTAADTAVYYCARGNYYETYLGFDVWGQGTLVTVSSASTKGPSVFPLAPSSKSTSGGTAALGCLVKDYFPEPVTVSWNSGALTSGVHTFPAVLQSSGLYSLSSVVTVPSSSLGTQTYICNVNHKPSNTKVDKKVEPKSCDKTHTCPPCPAPELLGGPSVFLFPPKPKDTLMISRTPEVTCVVVDVSHEDPEVKFNWYVDGVEVHNAKTKPREEQYGSTYRVVSVLTVLHQDWLNGKEYKCKVSNKALPAPIEKTISKAKGQPREPQVYTLPPSRDELTKNQVSLWCLVKGFYPSDIAVEWESNGQPENNYKTTPPVLDSDGSFFLYSKLTVDKSRWQQGNVFSCSVMHEALHNHYTQKSLSLSPGK

SEQ ID NO: 612 - protein, 451 aa, artificial
  Synthetic polypeptide
ELQLQESGPGLVKPSETLSLTCTVSGGSITSSNYYWGWIRQPPGKGLEWIGSIDYTGSTYYQPSLKSRVTISVDTSKNQFSLKLSSVTAADTAVYYCARGNYYETYLGFDVWGQGTLVTVSSASTKGPSVFPLAPSSKSTSGGTAALGCLVKDYFPEPVTVSWNSGALTSGVHTFPAVLQSSGLYSLSSVVTVPSSSLGTQTYICNVNHKPSNTKVDKKVEPKSCDKTHTCPPCPAPELLGGPSVFLFPPKPKDTLYITREPEVTCVVVDVSHEDPEVKFNWYVDGVEVHNAKTKPREEQYGSTYRVVSVLTVLHQDWLNGKEYKCKVSNKALPAPIEKTISKAKGQPREPQVYTLPPSRDELTKNQVSLWCLVKGFYPSDIAVEWESNGQPENNYKTTPPVLDSDGSFFLYSKLTVDKSRWQQGNVFSCSVMHEALHNHYTQKSLSLSPG

SEQ ID NO: 613 - protein, 452 aa, artificial
  Synthetic polypeptide
ELQLQESGPGLVKPSETLSLTCTVSGGSITSSNYYWGWIRQPPGKGLEWIGSIDYTGSTYYQPSLKSRVTISVDTSKNQFSLKLSSVTAADTAVYYCARGNYYETYLGFDVWGQGTLVTVSSASTKGPSVFPLAPSSKSTSGGTAALGCLVKDYFPEPVTVSWNSGALTSGVHTFPAVLQSSGLYSLSSVVTVPSSSLGTQTYICNVNHKPSNTKVDKKVEPKSCDKTHTCPPCPAPELLGGPSVFLFPPKPKDTLYITREPEVTCVVVDVSHEDPEVKFNWYVDGVEVHNAKTKPREEQYGSTYRVVSVLTVLHQDWLNGKEYKCKVSNKALPAPIEKTISKAKGQPREPQVYTLPPSRDELTKNQVSLWCLVKGFYPSDIAVEWESNGQPENNYKTTPPVLDSDGSFFLYSKLTVDKSRWQQGNVFSCSVMHEALHNHYTQKSLSLSPGK

SEQ ID NO: 614 - protein, 452 aa, artificial
  Synthetic polypeptide
ELQLQESGPGLVKPSETLSLTCTVSGGSITSSNYYWGWIRQPPGKGLEWIGSIDYTGSTYYQPSLKSRVTISVDTSKNQFSLKLSSVTAADTAVYYCARGNYYETYLGFDVWGQGTLVTVSSASTKGPSVFPLAPSSKSTSGGTAALGCLVKDYFPEPVTVSWNSGALTSGVHTFPAVLQSSGLYSLSSVVTVPSSSLGTQTYICNVNHKPSNTKVDKKVEPKSCDKTHTCPPCPAPELLGGPSVFLFPPKPKDTLMISRTPEVTCVVVDVSHEDPEVKFNWYVDGVEVHNAKTKPREEQYGSTYRVVSVLTVLHQDWLNGKEYKCKVSNKALPAPIEKTISKAKGQPREPQVYTLPPSRDELTKNQVSLSCAVKGFYPSDIAVEWESNGQPENNYKTTPPVLDSDGSFFLVSKLTVDKSRWQQGNVFSCSVMHEALHNHYTQKSLSLSPGK

SEQ ID NO: 615 - protein, 451 aa, artificial
  Synthetic polypeptide
ELQLQESGPGLVKPSETLSLTCTVSGGSITSSNYYWGWIRQPPGKGLEWIGSIDYTGSTYYQPSLKSRVTISVDTSKNQFSLKLSSVTAADTAVYYCARGNYYETYLGFDVWGQGTLVTVSSASTKGPSVFPLAPSSKSTSGGTAALGCLVKDYFPEPVTVSWNSGALTSGVHTFPAVLQSSGLYSLSSVVTVPSSSLGTQTYICNVNHKPSNTKVDKKVEPKSCDKTHTCPPCPAPELLGGPSVFLFPPKPKDTLYITREPEVTCVVVDVSHEDPEVKFNWYVDGVEVHNAKTKPREEQYGSTYRVVSVLTVLHQDWLNGKEYKCKVSNKALPAPIEKTISKAKGQPREPQVYTLPPSRDELTKNQVSLSCAVKGFYPSDIAVEWESNGQPENNYKTTPPVLDSDGSFFLVSKLTVDKSRWQQGNVFSCSVMHEALHNHYTQKSLSLSPG

SEQ ID NO: 616 - protein, 452 aa, artificial
  Synthetic polypeptide
ELQLQESGPGLVKPSETLSLTCTVSGGSITSSNYYWGWIRQPPGKGLEWIGSIDYTGSTYYQPSLKSRVTISVDTSKNQFSLKLSSVTAADTAVYYCARGNYYETYLGFDVWGQGTLVTVSSASTKGPSVFPLAPSSKSTSGGTAALGCLVKDYFPEPVTVSWNSGALTSGVHTFPAVLQSSGLYSLSSVVTVPSSSLGTQTYICNVNHKPSNTKVDKKVEPKSCDKTHTCPPCPAPELLGGPSVFLFPPKPKDTLYITREPEVTCVVVDVSHEDPEVKFNWYVDGVEVHNAKTKPREEQYGSTYRVVSVLTVLHQDWLNGKEYKCKVSNKALPAPIEKTISKAKGQPREPQVYTLPPSRDELTKNQVSLSCAVKGFYPSDIAVEWESNGQPENNYKTTPPVLDSDGSFFLVSKLTVDKSRWQQGNVFSCSVMHEALHNHYTQKSLSLSPGK

SEQ ID NO: 617 - protein, 453 aa, artificial
  Synthetic polypeptide
ELQLQESGPGLVKPSETLSLTCTVSGGSISTSSYYWGWIRQPPGKGLEWIGSIYYTGNTYYNPSLKSRVTISVDTSKNQFSLKLSSVTAADTAVYYCARVRYGVGVPRYFDPWGQGTLVTVSSASTKGPSVFPLAPSSKSTSGGTAALGCLVKDYFPEPVTVSWNSGALTSGVHTFPAVLQSSGLYSLSSVVTVPSSSLGTQTYICNVNHKPSNTKVDKKVEPKSCDKTHTCPPCPAPELLGGPSVFLFPPKPKDTLMISRTPEVTCVVVDVSHEDPEVKFNWYVDGVEVHNAKTKPREEQYGSTYRVVSVLTVLHQDWLNGKEYKCKVSNKALPAPIEKTISKAKGQPREPQVYTLPPSRDELTKNQVSLTCLVKGFYPSDIAVEWESNGQPENNYKTTPPVLDSDGSFFLYSKLTVDKSRWQQGNVFSCSVMHEALHNHYTQKSLSLSPGK

SEQ ID NO: 618 - protein, 452 aa, artificial
  Synthetic polypeptide
ELQLQESGPGLVKPSETLSLTCTVSGGSISTSSYYWGWIRQPPGKGLEWIGSIYYTGNTYYNPSLKSRVTISVDTSKNQFSLKLSSVTAADTAVYYCARVRYGVGVPRYFDPWGQGTLVTVSSASTKGPSVFPLAPSSKSTSGGTAALGCLVKDYFPEPVTVSWNSGALTSGVHTFPAVLQSSGLYSLSSVVTVPSSSLGTQTYICNVNHKPSNTKVDKKVEPKSCDKTHTCPPCPAPELLGGPSVFLFPPKPKDTYITRETPEVTCVVVDVSHEDPEVKFNWYVDGVEVHNAKTKPREEQYGSTYRVVSVLTVLHQDWLNGKEYKCKVSNKALPAPIEKTISKAKGQPREPQVYTLPPSRDELTKNQVSLTCLVKGFYPSDIAVEWESNGQPENNYKTTPPVLDSDGSFFLYSKLTVDKSRWQQGNVFSCSVMHEALHNHYTQKSLSLSPG

SEQ ID NO: 619 - protein, 453 aa, artificial
  Synthetic polypeptide
ELQLQESGPGLVKPSETLSLTCTVSGGSISTSSYYWGWIRQPPGKGLEWIGSIYYTGNTYYNPSLKSRVTISVDTSKNQFSLKLSSVTAADTAVYYCARVRYGVGVPRYFDPWGQGTLVTVSSASTKGPSVFPLAPSSKSTSGGTAALGCLVKDYFPEPVTVSWNSGALTSGVHTFPAVLQSSGLYSLSSVVTVPSSSLGTQTYICNVNHKPSNTKVDKKVEPKSCDKTHTCPPCPAPELLGGPSVFLFPPKPKDTYITRETPEVTCVVVDVSHEDPEVKFNWYVDGVEVHNAKTKPREEQYGSTYRVVSVLTVLHQDWLNGKEYKCKVSNKALPAPIEKTISKAKGQPREPQVYTLPPSRDELTKNQVSLTCLVKGFYPSDIAVEWESNGQPENNYKTTPPVLDSDGSFFLYSKLTVDKSRWQQGNVFSCSVMHEALHNHYTQKSLSLSPGK

SEQ ID NO: 620 - protein, 453 aa, artificial
  Synthetic polypeptide
ELQLQESGPGLVKPSETLSLTCTVSGGSISTSSYYWGWIRQPPGKGLEWIGSIYYTGNTYYNPSLKSRVTISVDTSKNQFSLKLSSVTAADTAVYYCARVRYGVGVPRYFDPWGQGTLVTVSSASTKGPSVFPLAPSSKSTSGGTAALGCLVKDYFPEPVTVSWNSGALTSGVHTFPAVLQSSGLYSLSSVVTVPSSSLGTQTYICNVNHKPSNTKVDKKVEPKSCDKTHTCPPCPAPELLGGPSVFLFPPKPKDTLMISRTPEVTCVVVDVSHEDPEVKFNWYVDGVEVHNAKTKPREEQYGSTYRVVSVLTVLHQDWLNGKEYKCKVSNKALPAPIEKTISKAKGQPREPQVYTLPPSRDELTKNQVSLWCLVKGFYPSDIAVEWESNGQPENNYKTTPPVLDSDGSFFLYSKLTVDKSRWQQGNVFSCSVMHEALHNHYTQKSLSLSPGK

SEQ ID NO: 621 - protein, 452 aa, artificial
  Synthetic polypeptide
ELQLQESGPGLVKPSETLSLTCTVSGGSISTSSYYWGWIRQPPGKGLEWIGSIYYTGNTYYNPSLKSRVTISVDTSKNQFSLKLSSVTAADTAVYYCARVRYGVGVPRYFDPWGQGTLVTVSSASTKGPSVFPLAPSSKSTSGGTAALGCLVKDYFPEPVTVSWNSGALTSGVHTFPAVLQSSGLYSLSSVVTVPSSSLGTQTYICNVNHKPSNTKVDKKVEPKSCDKTHTCPPCPAPELLGGPSVFLFPPKPKDTYITRETPEVTCVVVDVSHEDPEVKFNWYVDGVEVHNAKTKPREEQYGSTYRVVSVLTVLHQDWLNGKEYKCKVSNKALPAPIEKTISKAKGQPREPQVYTLPPSRDELTKNQVSLWCLVKGFYPSDIAVEWESNGQPENNYKTTPPVLDSDGSFFLYSKLTVDKSRWQQGNVFSCSVMHEALHNHYTQKSLSLSPG

SEQ ID NO: 622 - protein, 453 aa, artificial
  Synthetic polypeptide
ELQLQESGPGLVKPSETLSLTCTVSGGSISTSSYYWGWIRQPPGKGLEWIGSIYYTGNTYYNPSLKSRVTISVDTSKNQFSLKLSSVTAADTAVYYCARVRYGVGVPRYFDPWGQGTLVTVSSASTKGPSVFPLAPSSKSTSGGTAALGCLVKDYFPEPVTVSWNSGALTSGVHTFPAVLQSSGLYSLSSVVTVPSSSLGTQTYICNVNHKPSNTKVDKKVEPKSCDKTHTCPPCPAPELLGGPSVFLFPPKPKDTYITRETPEVTCVVVDVSHEDPEVKFNWYVDGVEVHNAKTKPREEQYGSTYRVVSVLTVLHQDWLNGKEYKCKVSNKALPAPIEKTISKAKGQPREPQVYTLPPSRDELTKNQVSLWCLVKGFYPSDIAVEWESNGQPENNYKTTPPVLDSDGSFFLYSKLTVDKSRWQQGNVFSCSVMHEALHNHYTQKSLSLSPGK

SEQ ID NO: 623 - protein, 453 aa, artificial
  Synthetic polypeptide
ELQLQESGPGLVKPSETLSLTCTVSGGSISTSSYYWGWIRQPPGKGLEWIGSIYYTGNTYYNPSLKSRVTISVDTSKNQFSLKLSSVTAADTAVYYCARVRYGVGVPRYFDPWGQGTLVTVSSASTKGPSVFPLAPSSKSTSGGTAALGCLVKDYFPEPVTVSWNSGALTSGVHTFPAVLQSSGLYSLSSVVTVPSSSLGTQTYICNVNHKPSNTKVDKKVEPKSCDKTHTCPPCPAPELLGGPSVFLFPPKPKDTLMISRTPEVTCVVVDVSHEDPEVKFNWYVDGVEVHNAKTKPREEQYGSTYRVVSVLTVLHQDWLNGKEYKCKVSNKALPAPIEKTISKAKGQPREPQVYTLPPSRDELTKNQVSLSCAVKGFYPSDIAVEWESNGQPENNYKTTPPVLDSDGSFFLVSKLTVDKSRWQQGNVFSCSVMHEALHNHYTQKSLSLSPGK

SEQ ID NO: 624 - protein, 452 aa, artificial
  Synthetic polypeptide
ELQLQESGPGLVKPSETLSLTCTVSGGSISTSSYYWGWIRQPPGKGLEWIGSIYYTGNTYYNPSLKSRVTISVDTSKNQFSLKLSSVTAADTAVYYCARVRYGVGVPRYFDPWGQGTLVTVSSASTKGPSVFPLAPSSKSTSGGTAALGCLVKDYFPEPVTVSWNSGALTSGVHTFPAVLQSSGLYSLSSVVTVPSSSLGTQTYICNVNHKPSNTKVDKKVEPKSCDKTHTCPPCPAPELLGGPSVFLFPPKPKDTYITRETPEVTCVVVDVSHEDPEVKFNWYVDGVEVHNAKTKPREEQYGSTYRVVSVLTVLHQDWLNGKEYKCKVSNKALPAPIEKTISKAKGQPREPQVYTLPPSRDELTKNQVSLSCAVKGFYPSDIAVEWESNGQPENNYKTTPPVLDSDGSFFLVSKLTVDKSRWQQGNVFSCSVMHEALHNHYTQKSLSLSPG

SEQ ID NO: 625 - protein, 453 aa, artificial
  Synthetic polypeptide
ELQLQESGPGLVKPSETLSLTCTVSGGSISTSSYYWGWIRQPPGKGLEWIGSIYYTGNTYYNPSLKSRVTISVDTSKNQFSLKLSSVTAADTAVYYCARVRYGVGVPRYFDPWGQGTLVTVSSASTKGPSVFPLAPSSKSTSGGTAALGCLVKDYFPEPVTVSWNSGALTSGVHTFPAVLQSSGLYSLSSVVTVPSSSLGTQTYICNVNHKPSNTKVDKKVEPKSCDKTHTCPPCPAPELLGGPSVFLFPPKPKDTYITRETPEVTCVVVDVSHEDPEVKFNWYVDGVEVHNAKTKPREEQYGSTYRVVSVLTVLHQDWLNGKEYKCKVSNKALPAPIEKTISKAKGQPREPQVYTLPPSRDELTKNQVSLSCAVKGFYPSDIAVEWESNGQPENNYKTTPPVLDSDGSFFLVSKLTVDKSRWQQGNVFSCSVMHEALHNHYTQKSLSLSPGK

SEQ ID NO: 626 - protein, 453 aa, artificial
  Synthetic polypeptide
ELQLQESGPGLVKPSETLSLTCTVSGGSISDSSYYWGWIRQPPGKGLEWIGSIYYTGNTYYNSSLKSRVTISVDTSKNQFSLKLSSVTAADTAVYYCARVRYGVGVPRYFDPWGQGTLVTVSSASTKGPSVFPLAPSSKSTSGGTAALGCLVKDYFPEPVTVSWNSGALTSGVHTFPAVLQSSGLYSLSSVVTVPSSSLGTQTYICNVNHKPSNTKVDKKVEPKSCDKTHTCPPCPAPELLGGPSVFLFPPKPKDTLMISRTPEVTCVVVDVSHEDPEVKFNWYVDGVEVHNAKTKPREEQYGSTYRVVSVLTVLHQDWLNGKEYKCKVSNKALPAPIEKTISKAKGQPREPQVYTLPPSRDELTKNQVSLTCLVKGFYPSDIAVEWESNGQPENNYKTTPPVLDSDGSFFLYSKLTVDKSRWQQGNVFSCSVMHEALHNHYTQKSLSLSPGK

SEQ ID NO: 627 - protein, 452 aa, artificial
  Synthetic polypeptide
ELQLQESGPGLVKPSETLSLTCTVSGGSISDSSYYWGWIRQPPGKGLEWIGSIYYTGNTYYNSSLKSRVTISVDTSKNQFSLKLSSVTAADTAVYYCARVRYGVGVPRYFDPWGQGTLVTVSSASTKGPSVFPLAPSSKSTSGGTAALGCLVKDYFPEPVTVSWNSGALTSGVHTFPAVLQSSGLYSLSSVVTVPSSSLGTQTYICNVNHKPSNTKVDKKVEPKSCDKTHTCPPCPAPELLGGPSVFLFPPKPKDTYITRETPEVTCVVVDVSHEDPEVKFNWYVDGVEVHNAKTKPREEQYGSTYRVVSVLTVLHQDWLNGKEYKCKVSNKALPAPIEKTISKAKGQPREPQVYTLPPSRDELTKNQVSLTCLVKGFYPSDIAVEWESNGQPENNYKTTPPVLDSDGSFFLYSKLTVDKSRWQQGNVFSCSVMHEALHNHYTQKSLSLSPG

SEQ ID NO: 628 - protein, 453 aa, artificial
  Synthetic polypeptide
ELQLQESGPGLVKPSETLSLTCTVSGGSISDSSYYWGWIRQPPGKGLEWIGSIYYTGNTYYNSSLKSRVTISVDTSKNQFSLKLSSVTAADTAVYYCARVRYGVGVPRYFDPWGQGTLVTVSSASTKGPSVFPLAPSSKSTSGGTAALGCLVKDYFPEPVTVSWNSGALTSGVHTFPAVLQSSGLYSLSSVVTVPSSSLGTQTYICNVNHKPSNTKVDKKVEPKSCDKTHTCPPCPAPELLGGPSVFLFPPKPKDTYITRETPEVTCVVVDVSHEDPEVKFNWYVDGVEVHNAKTKPREEQYGSTYRVVSVLTVLHQDWLNGKEYKCKVSNKALPAPIEKTISKAKGQPREPQVYTLPPSRDELTKNQVSLTCLVKGFYPSDIAVEWESNGQPENNYKTTPPVLDSDGSFFLYSKLTVDKSRWQQGNVFSCSVMHEALHNHYTQKSLSLSPGK

SEQ ID NO: 629 - protein, 453 aa, artificial
  Synthetic polypeptide
ELQLQESGPGLVKPSETLSLTCTVSGGSISDSSYYWGWIRQPPGKGLEWIGSIYYTGNTYYNSSLKSRVTISVDTSKNQFSLKLSSVTAADTAVYYCARVRYGVGVPRYFDPWGQGTLVTVSSASTKGPSVFPLAPSSKSTSGGTAALGCLVKDYFPEPVTVSWNSGALTSGVHTFPAVLQSSGLYSLSSVVTVPSSSLGTQTYICNVNHKPSNTKVDKKVEPKSCDKTHTCPPCPAPELLGGPSVFLFPPKPKDTLMISRTPEVTCVVVDVSHEDPEVKFNWYVDGVEVHNAKTKPREEQYGSTYRVVSVLTVLHQDWLNGKEYKCKVSNKALPAPIEKTISKAKGQPREPQVYTLPPSRDELTKNQVSLWCLVKGFYPSDIAVEWESNGQPENNYKTTPPVLDSDGSFFLYSKLTVDKSRWQQGNVFSCSVMHEALHNHYTQKSLSLSPGK

SEQ ID NO: 630 - protein, 452 aa, artificial
  Synthetic polypeptide
ELQLQESGPGLVKPSETLSLTCTVSGGSISDSSYYWGWIRQPPGKGLEWIGSIYYTGNTYYNSSLKSRVTISVDTSKNQFSLKLSSVTAADTAVYYCARVRYGVGVPRYFDPWGQGTLVTVSSASTKGPSVFPLAPSSKSTSGGTAALGCLVKDYFPEPVTVSWNSGALTSGVHTFPAVLQSSGLYSLSSVVTVPSSSLGTQTYICNVNHKPSNTKVDKKVEPKSCDKTHTCPPCPAPELLGGPSVFLFPPKPKDTYITRETPEVTCVVVDVSHEDPEVKFNWYVDGVEVHNAKTKPREEQYGSTYRVVSVLTVLHQDWLNGKEYKCKVSNKALPAPIEKTISKAKGQPREPQVYTLPPSRDELTKNQVSLWCLVKGFYPSDIAVEWESNGQPENNYKTTPPVLDSDGSFFLYSKLTVDKSRWQQGNVFSCSVMHEALHNHYTQKSLSLSPG

SEQ ID NO: 631 - protein, 453 aa, artificial
  Synthetic polypeptide
ELQLQESGPGLVKPSETLSLTCTVSGGSISDSSYYWGWIRQPPGKGLEWIGSIYYTGNTYYNSSLKSRVTISVDTSKNQFSLKLSSVTAADTAVYYCARVRYGVGVPRYFDPWGQGTLVTVSSASTKGPSVFPLAPSSKSTSGGTAALGCLVKDYFPEPVTVSWNSGALTSGVHTFPAVLQSSGLYSLSSVVTVPSSSLGTQTYICNVNHKPSNTKVDKKVEPKSCDKTHTCPPCPAPELLGGPSVFLFPPKPKDTYITRETPEVTCVVVDVSHEDPEVKFNWYVDGVEVHNAKTKPREEQYGSTYRVVSVLTVLHQDWLNGKEYKCKVSNKALPAPIEKTISKAKGQPREPQVYTLPPSRDELTKNQVSLWCLVKGFYPSDIAVEWESNGQPENNYKTTPPVLDSDGSFFLYSKLTVDKSRWQQGNVFSCSVMHEALHNHYTQKSLSLSPGK

SEQ ID NO: 632 - protein, 453 aa, artificial
  Synthetic polypeptide
ELQLQESGPGLVKPSETLSLTCTVSGGSISDSSYYWGWIRQPPGKGLEWIGSIYYTGNTYYNSSLKSRVTISVDTSKNQFSLKLSSVTAADTAVYYCARVRYGVGVPRYFDPWGQGTLVTVSSASTKGPSVFPLAPSSKSTSGGTAALGCLVKDYFPEPVTVSWNSGALTSGVHTFPAVLQSSGLYSLSSVVTVPSSSLGTQTYICNVNHKPSNTKVDKKVEPKSCDKTHTCPPCPAPELLGGPSVFLFPPKPKDTLMISRTPEVTCVVVDVSHEDPEVKFNWYVDGVEVHNAKTKPREEQYGSTYRVVSVLTVLHQDWLNGKEYKCKVSNKALPAPIEKTISKAKGQPREPQVYTLPPSRDELTKNQVSLSCAVKGFYPSDIAVEWESNGQPENNYKTTPPVLDSDGSFFLVSKLTVDKSRWQQGNVFSCSVMHEALHNHYTQKSLSLSPGK

SEQ ID NO: 633 - protein, 452 aa, artificial
  Synthetic polypeptide
ELQLQESGPGLVKPSETLSLTCTVSGGSISDSSYYWGWIRQPPGKGLEWIGSIYYTGNTYYNSSLKSRVTISVDTSKNQFSLKLSSVTAADTAVYYCARVRYGVGVPRYFDPWGQGTLVTVSSASTKGPSVFPLAPSSKSTSGGTAALGCLVKDYFPEPVTVSWNSGALTSGVHTFPAVLQSSGLYSLSSVVTVPSSSLGTQTYICNVNHKPSNTKVDKKVEPKSCDKTHTCPPCPAPELLGGPSVFLFPPKPKDTYITRETPEVTCVVVDVSHEDPEVKFNWYVDGVEVHNAKTKPREEQYGSTYRVVSVLTVLHQDWLNGKEYKCKVSNKALPAPIEKTISKAKGQPREPQVYTLPPSRDELTKNQVSLSCAVKGFYPSDIAVEWESNGQPENNYKTTPPVLDSDGSFFLVSKLTVDKSRWQQGNVFSCSVMHEALHNHYTQKSLSLSPG

SEQ ID NO: 634 - protein, 453 aa, artificial
  Synthetic polypeptide
ELQLQESGPGLVKPSETLSLTCTVSGGSISDSSYYWGWIRQPPGKGLEWIGSIYYTGNTYYNSSLKSRVTISVDTSKNQFSLKLSSVTAADTAVYYCARVRYGVGVPRYFDPWGQGTLVTVSSASTKGPSVFPLAPSSKSTSGGTAALGCLVKDYFPEPVTVSWNSGALTSGVHTFPAVLQSSGLYSLSSVVTVPSSSLGTQTYICNVNHKPSNTKVDKKVEPKSCDKTHTCPPCPAPELLGGPSVFLFPPKPKDTYITRETPEVTCVVVDVSHEDPEVKFNWYVDGVEVHNAKTKPREEQYGSTYRVVSVLTVLHQDWLNGKEYKCKVSNKALPAPIEKTISKAKGQPREPQVYTLPPSRDELTKNQVSLSCAVKGFYPSDIAVEWESNGQPENNYKTTPPVLDSDGSFFLVSKLTVDKSRWQQGNVFSCSVMHEALHNHYTQKSLSLSPGK

SEQ ID NO: 635 - protein, 453 aa, artificial
  Synthetic polypeptide
ELQLQESGPGLVKPSETLSLTCTVSGGSISESSYYWGWIRQPPGKGLEWIGSIYYTGNTYYNPSLKSRVTISVDTSKNQFSLKLSSVTAADTAVYYCAGVRYGVGVPRYFDPWGQGTLVTVSSASTKGPSVFPLAPSSKSTSGGTAALGCLVKDYFPEPVTVSWNSGALTSGVHTFPAVLQSSGLYSLSSVVTVPSSSLGTQTYICNVNHKPSNTKVDKKVEPKSCDKTHTCPPCPAPELLGGPSVFLFPPKPKDTLMISRTPEVTCVVVDVSHEDPEVKFNWYVDGVEVHNAKTKPREEQYGSTYRVVSVLTVLHQDWLNGKEYKCKVSNKALPAPIEKTISKAKGQPREPQVYTLPPSRDELTKNQVSLTCLVKGFYPSDIAVEWESNGQPENNYKTTPPVLDSDGSFFLYSKLTVDKSRWQQGNVFSCSVMHEALHNHYTQKSLSLSPGK

SEQ ID NO: 636 - protein, 452 aa, artificial
  Synthetic polypeptide
ELQLQESGPGLVKPSETLSLTCTVSGGSISESSYYWGWIRQPPGKGLEWIGSIYYTGNTYYNPSLKSRVTISVDTSKNQFSLKLSSVTAADTAVYYCAGVRYGVGVPRYFDPWGQGTLVTVSSASTKGPSVFPLAPSSKSTSGGTAALGCLVKDYFPEPVTVSWNSGALTSGVHTFPAVLQSSGLYSLSSVVTVPSSSLGTQTYICNVNHKPSNTKVDKKVEPKSCDKTHTCPPCPAPELLGGPSVFLFPPKPKDTYITRETPEVTCVVVDVSHEDPEVKFNWYVDGVEVHNAKTKPREEQYGSTYRVVSVLTVLHQDWLNGKEYKCKVSNKALPAPIEKTISKAKGQPREPQVYTLPPSRDELTKNQVSLTCLVKGFYPSDIAVEWESNGQPENNYKTTPPVLDSDGSFFLYSKLTVDKSRWQQGNVFSCSVMHEALHNHYTQKSLSLSPG

SEQ ID NO: 637 - protein, 453 aa, artificial
  Synthetic polypeptide
ELQLQESGPGLVKPSETLSLTCTVSGGSISESSYYWGWIRQPPGKGLEWIGSIYYTGNTYYNPSLKSRVTISVDTSKNQFSLKLSSVTAADTAVYYCAGVRYGVGVPRYFDPWGQGTLVTVSSASTKGPSVFPLAPSSKSTSGGTAALGCLVKDYFPEPVTVSWNSGALTSGVHTFPAVLQSSGLYSLSSVVTVPSSSLGTQTYICNVNHKPSNTKVDKKVEPKSCDKTHTCPPCPAPELLGGPSVFLFPPKPKDTYITRETPEVTCVVVDVSHEDPEVKFNWYVDGVEVHNAKTKPREEQYGSTYRVVSVLTVLHQDWLNGKEYKCKVSNKALPAPIEKTISKAKGQPREPQVYTLPPSRDELTKNQVSLTCLVKGFYPSDIAVEWESNGQPENNYKTTPPVLDSDGSFFLYSKLTVDKSRWQQGNVFSCSVMHEALHNHYTQKSLSLSPGK

SEQ ID NO: 638 - protein, 453 aa, artificial
  Synthetic polypeptide
ELQLQESGPGLVKPSETLSLTCTVSGGSISESSYYWGWIRQPPGKGLEWIGSIYYTGNTYYNPSLKSRVTISVDTSKNQFSLKLSSVTAADTAVYYCAGVRYGVGVPRYFDPWGQGTLVTVSSASTKGPSVFPLAPSSKSTSGGTAALGCLVKDYFPEPVTVSWNSGALTSGVHTFPAVLQSSGLYSLSSVVTVPSSSLGTQTYICNVNHKPSNTKVDKKVEPKSCDKTHTCPPCPAPELLGGPSVFLFPPKPKDTLMISRTPEVTCVVVDVSHEDPEVKFNWYVDGVEVHNAKTKPREEQYGSTYRVVSVLTVLHQDWLNGKEYKCKVSNKALPAPIEKTISKAKGQPREPQVYTLPPSRDELTKNQVSLWCLVKGFYPSDIAVEWESNGQPENNYKTTPPVLDSDGSFFLYSKLTVDKSRWQQGNVFSCSVMHEALHNHYTQKSLSLSPGK

SEQ ID NO: 639 - protein, 452 aa, artificial
  Synthetic polypeptide
ELQLQESGPGLVKPSETLSLTCTVSGGSISESSYYWGWIRQPPGKGLEWIGSIYYTGNTYYNPSLKSRVTISVDTSKNQFSLKLSSVTAADTAVYYCAGVRYGVGVPRYFDPWGQGTLVTVSSASTKGPSVFPLAPSSKSTSGGTAALGCLVKDYFPEPVTVSWNSGALTSGVHTFPAVLQSSGLYSLSSVVTVPSSSLGTQTYICNVNHKPSNTKVDKKVEPKSCDKTHTCPPCPAPELLGGPSVFLFPPKPKDTYITRETPEVTCVVVDVSHEDPEVKFNWYVDGVEVHNAKTKPREEQYGSTYRVVSVLTVLHQDWLNGKEYKCKVSNKALPAPIEKTISKAKGQPREPQVYTLPPSRDELTKNQVSLWCLVKGFYPSDIAVEWESNGQPENNYKTTPPVLDSDGSFFLYSKLTVDKSRWQQGNVFSCSVMHEALHNHYTQKSLSLSPG

SEQ ID NO: 640 - protein, 453 aa, artificial
  Synthetic polypeptide
ELQLQESGPGLVKPSETLSLTCTVSGGSISESSYYWGWIRQPPGKGLEWIGSIYYTGNTYYNPSLKSRVTISVDTSKNQFSLKLSSVTAADTAVYYCAGVRYGVGVPRYFDPWGQGTLVTVSSASTKGPSVFPLAPSSKSTSGGTAALGCLVKDYFPEPVTVSWNSGALTSGVHTFPAVLQSSGLYSLSSVVTVPSSSLGTQTYICNVNHKPSNTKVDKKVEPKSCDKTHTCPPCPAPELLGGPSVFLFPPKPKDTYITRETPEVTCVVVDVSHEDPEVKFNWYVDGVEVHNAKTKPREEQYGSTYRVVSVLTVLHQDWLNGKEYKCKVSNKALPAPIEKTISKAKGQPREPQVYTLPPSRDELTKNQVSLWCLVKGFYPSDIAVEWESNGQPENNYKTTPPVLDSDGSFFLYSKLTVDKSRWQQGNVFSCSVMHEALHNHYTQKSLSLSPGK

SEQ ID NO: 641 - protein, 453 aa, artificial
  Synthetic polypeptide
ELQLQESGPGLVKPSETLSLTCTVSGGSISESSYYWGWIRQPPGKGLEWIGSIYYTGNTYYNPSLKSRVTISVDTSKNQFSLKLSSVTAADTAVYYCAGVRYGVGVPRYFDPWGQGTLVTVSSASTKGPSVFPLAPSSKSTSGGTAALGCLVKDYFPEPVTVSWNSGALTSGVHTFPAVLQSSGLYSLSSVVTVPSSSLGTQTYICNVNHKPSNTKVDKKVEPKSCDKTHTCPPCPAPELLGGPSVFLFPPKPKDTLMISRTPEVTCVVVDVSHEDPEVKFNWYVDGVEVHNAKTKPREEQYGSTYRVVSVLTVLHQDWLNGKEYKCKVSNKALPAPIEKTISKAKGQPREPQVYTLPPSRDELTKNQVSLSCAVKGFYPSDIAVEWESNGQPENNYKTTPPVLDSDGSFFLVSKLTVDKSRWQQGNVFSCSVMHEALHNHYTQKSLSLSPGK

SEQ ID NO: 642 - protein, 452 aa, artificial
  Synthetic polypeptide
ELQLQESGPGLVKPSETLSLTCTVSGGSISESSYYWGWIRQPPGKGLEWIGSIYYTGNTYYNPSLKSRVTISVDTSKNQFSLKLSSVTAADTAVYYCAGVRYGVGVPRYFDPWGQGTLVTVSSASTKGPSVFPLAPSSKSTSGGTAALGCLVKDYFPEPVTVSWNSGALTSGVHTFPAVLQSSGLYSLSSVVTVPSSSLGTQTYICNVNHKPSNTKVDKKVEPKSCDKTHTCPPCPAPELLGGPSVFLFPPKPKDTYITRETPEVTCVVVDVSHEDPEVKFNWYVDGVEVHNAKTKPREEQYGSTYRVVSVLTVLHQDWLNGKEYKCKVSNKALPAPIEKTISKAKGQPREPQVYTLPPSRDELTKNQVSLSCAVKGFYPSDIAVEWESNGQPENNYKTTPPVLDSDGSFFLVSKLTVDKSRWQQGNVFSCSVMHEALHNHYTQKSLSLSPG

SEQ ID NO: 643 - protein, 453 aa, artificial
  Synthetic polypeptide
ELQLQESGPGLVKPSETLSLTCTVSGGSISESSYYWGWIRQPPGKGLEWIGSIYYTGNTYYNPSLKSRVTISVDTSKNQFSLKLSSVTAADTAVYYCAGVRYGVGVPRYFDPWGQGTLVTVSSASTKGPSVFPLAPSSKSTSGGTAALGCLVKDYFPEPVTVSWNSGALTSGVHTFPAVLQSSGLYSLSSVVTVPSSSLGTQTYICNVNHKPSNTKVDKKVEPKSCDKTHTCPPCPAPELLGGPSVFLFPPKPKDTYITRETPEVTCVVVDVSHEDPEVKFNWYVDGVEVHNAKTKPREEQYGSTYRVVSVLTVLHQDWLNGKEYKCKVSNKALPAPIEKTISKAKGQPREPQVYTLPPSRDELTKNQVSLSCAVKGFYPSDIAVEWESNGQPENNYKTTPPVLDSDGSFFLVSKLTVDKSRWQQGNVFSCSVMHEALHNHYTQKSLSLSPGK

SEQ ID NO: 644 - protein, 453 aa, artificial
  Synthetic polypeptide
ELQLQESGPGLVKPSETLSLTCTVSGGSISTSSDYWGWIRQPPGKGLEWIGSIYYTGNTYYLPSLKSRVTISVDTSKNQFSLKLSSVTAADTAVYYCSRVRYGVGVPRYFDPWGQGTLVTVSSASTKGPSVFPLAPSSKSTSGGTAALGCLVKDYFPEPVTVSWNSGALTSGVHTFPAVLQSSGLYSLSSVVTVPSSSLGTQTYICNVNHKPSNTKVDKKVEPKSCDKTHTCPPCPAPELLGGPSVFLFPPKPKDTLMISRTPEVTCVVVDVSHEDPEVKFNWYVDGVEVHNAKTKPREEQYGSTYRVVSVLTVLHQDWLNGKEYKCKVSNKALPAPIEKTISKAKGQPREPQVYTLPPSRDELTKNQVSLTCLVKGFYPSDIAVEWESNGQPENNYKTTPPVLDSDGSFFLYSKLTVDKSRWQQGNVFSCSVMHEALHNHYTQKSLSLSPGK

SEQ ID NO: 645 - protein, 452 aa, artificial
  Synthetic polypeptide
ELQLQESGPGLVKPSETLSLTCTVSGGSISTSSDYWGWIRQPPGKGLEWIGSIYYTGNTYYLPSLKSRVTISVDTSKNQFSLKLSSVTAADTAVYYCSRVRYGVGVPRYFDPWGQGTLVTVSSASTKGPSVFPLAPSSKSTSGGTAALGCLVKDYFPEPVTVSWNSGALTSGVHTFPAVLQSSGLYSLSSVVTVPSSSLGTQTYICNVNHKPSNTKVDKKVEPKSCDKTHTCPPCPAPELLGGPSVFLFPPKPKDTYITRETPEVTCVVVDVSHEDPEVKFNWYVDGVEVHNAKTKPREEQYGSTYRVVSVLTVLHQDWLNGKEYKCKVSNKALPAPIEKTISKAKGQPREPQVYTLPPSRDELTKNQVSLTCLVKGFYPSDIAVEWESNGQPENNYKTTPPVLDSDGSFFLYSKLTVDKSRWQQGNVFSCSVMHEALHNHYTQKSLSLSPG

SEQ ID NO: 646 - protein, 453 aa, artificial
  Synthetic polypeptide
ELQLQESGPGLVKPSETLSLTCTVSGGSISTSSDYWGWIRQPPGKGLEWIGSIYYTGNTYYLPSLKSRVTISVDTSKNQFSLKLSSVTAADTAVYYCSRVRYGVGVPRYFDPWGQGTLVTVSSASTKGPSVFPLAPSSKSTSGGTAALGCLVKDYFPEPVTVSWNSGALTSGVHTFPAVLQSSGLYSLSSVVTVPSSSLGTQTYICNVNHKPSNTKVDKKVEPKSCDKTHTCPPCPAPELLGGPSVFLFPPKPKDTYITRETPEVTCVVVDVSHEDPEVKFNWYVDGVEVHNAKTKPREEQYGSTYRVVSVLTVLHQDWLNGKEYKCKVSNKALPAPIEKTISKAKGQPREPQVYTLPPSRDELTKNQVSLTCLVKGFYPSDIAVEWESNGQPENNYKTTPPVLDSDGSFFLYSKLTVDKSRWQQGNVFSCSVMHEALHNHYTQKSLSLSPGK

SEQ ID NO: 647 - protein, 453 aa, artificial
  Synthetic polypeptide
ELQLQESGPGLVKPSETLSLTCTVSGGSISTSSDYWGWIRQPPGKGLEWIGSIYYTGNTYYLPSLKSRVTISVDTSKNQFSLKLSSVTAADTAVYYCSRVRYGVGVPRYFDPWGQGTLVTVSSASTKGPSVFPLAPSSKSTSGGTAALGCLVKDYFPEPVTVSWNSGALTSGVHTFPAVLQSSGLYSLSSVVTVPSSSLGTQTYICNVNHKPSNTKVDKKVEPKSCDKTHTCPPCPAPELLGGPSVFLFPPKPKDTLMISRTPEVTCVVVDVSHEDPEVKFNWYVDGVEVHNAKTKPREEQYGSTYRVVSVLTVLHQDWLNGKEYKCKVSNKALPAPIEKTISKAKGQPREPQVYTLPPSRDELTKNQVSLWCLVKGFYPSDIAVEWESNGQPENNYKTTPPVLDSDGSFFLYSKLTVDKSRWQQGNVFSCSVMHEALHNHYTQKSLSLSPGK

SEQ ID NO: 648 - protein, 452 aa, artificial
  Synthetic polypeptide
ELQLQESGPGLVKPSETLSLTCTVSGGSISTSSDYWGWIRQPPGKGLEWIGSIYYTGNTYYLPSLKSRVTISVDTSKNQFSLKLSSVTAADTAVYYCSRVRYGVGVPRYFDPWGQGTLVTVSSASTKGPSVFPLAPSSKSTSGGTAALGCLVKDYFPEPVTVSWNSGALTSGVHTFPAVLQSSGLYSLSSVVTVPSSSLGTQTYICNVNHKPSNTKVDKKVEPKSCDKTHTCPPCPAPELLGGPSVFLFPPKPKDTYITRETPEVTCVVVDVSHEDPEVKFNWYVDGVEVHNAKTKPREEQYGSTYRVVSVLTVLHQDWLNGKEYKCKVSNKALPAPIEKTISKAKGQPREPQVYTLPPSRDELTKNQVSLWCLVKGFYPSDIAVEWESNGQPENNYKTTPPVLDSDGSFFLYSKLTVDKSRWQQGNVFSCSVMHEALHNHYTQKSLSLSPG

SEQ ID NO: 649 - protein, 453 aa, artificial
  Synthetic polypeptide
ELQLQESGPGLVKPSETLSLTCTVSGGSISTSSDYWGWIRQPPGKGLEWIGSIYYTGNTYYLPSLKSRVTISVDTSKNQFSLKLSSVTAADTAVYYCSRVRYGVGVPRYFDPWGQGTLVTVSSASTKGPSVFPLAPSSKSTSGGTAALGCLVKDYFPEPVTVSWNSGALTSGVHTFPAVLQSSGLYSLSSVVTVPSSSLGTQTYICNVNHKPSNTKVDKKVEPKSCDKTHTCPPCPAPELLGGPSVFLFPPKPKDTYITRETPEVTCVVVDVSHEDPEVKFNWYVDGVEVHNAKTKPREEQYGSTYRVVSVLTVLHQDWLNGKEYKCKVSNKALPAPIEKTISKAKGQPREPQVYTLPPSRDELTKNQVSLWCLVKGFYPSDIAVEWESNGQPENNYKTTPPVLDSDGSFFLYSKLTVDKSRWQQGNVFSCSVMHEALHNHYTQKSLSLSPGK

SEQ ID NO: 650 - protein, 453 aa, artificial
  Synthetic polypeptide
ELQLQESGPGLVKPSETLSLTCTVSGGSISTSSDYWGWIRQPPGKGLEWIGSIYYTGNTYYLPSLKSRVTISVDTSKNQFSLKLSSVTAADTAVYYCSRVRYGVGVPRYFDPWGQGTLVTVSSASTKGPSVFPLAPSSKSTSGGTAALGCLVKDYFPEPVTVSWNSGALTSGVHTFPAVLQSSGLYSLSSVVTVPSSSLGTQTYICNVNHKPSNTKVDKKVEPKSCDKTHTCPPCPAPELLGGPSVFLFPPKPKDTLMISRTPEVTCVVVDVSHEDPEVKFNWYVDGVEVHNAKTKPREEQYGSTYRVVSVLTVLHQDWLNGKEYKCKVSNKALPAPIEKTISKAKGQPREPQVYTLPPSRDELTKNQVSLSCAVKGFYPSDIAVEWESNGQPENNYKTTPPVLDSDGSFFLVSKLTVDKSRWQQGNVFSCSVMHEALHNHYTQKSLSLSPGK

SEQ ID NO: 651 - protein, 452 aa, artificial
  Synthetic polypeptide
ELQLQESGPGLVKPSETLSLTCTVSGGSISTSSDYWGWIRQPPGKGLEWIGSIYYTGNTYYLPSLKSRVTISVDTSKNQFSLKLSSVTAADTAVYYCSRVRYGVGVPRYFDPWGQGTLVTVSSASTKGPSVFPLAPSSKSTSGGTAALGCLVKDYFPEPVTVSWNSGALTSGVHTFPAVLQSSGLYSLSSVVTVPSSSLGTQTYICNVNHKPSNTKVDKKVEPKSCDKTHTCPPCPAPELLGGPSVFLFPPKPKDTYITRETPEVTCVVVDVSHEDPEVKFNWYVDGVEVHNAKTKPREEQYGSTYRVVSVLTVLHQDWLNGKEYKCKVSNKALPAPIEKTISKAKGQPREPQVYTLPPSRDELTKNQVSLSCAVKGFYPSDIAVEWESNGQPENNYKTTPPVLDSDGSFFLVSKLTVDKSRWQQGNVFSCSVMHEALHNHYTQKSLSLSPG

SEQ ID NO: 652 - protein, 453 aa, artificial
  Synthetic polypeptide
ELQLQESGPGLVKPSETLSLTCTVSGGSISTSSDYWGWIRQPPGKGLEWIGSIYYTGNTYYLPSLKSRVTISVDTSKNQFSLKLSSVTAADTAVYYCSRVRYGVGVPRYFDPWGQGTLVTVSSASTKGPSVFPLAPSSKSTSGGTAALGCLVKDYFPEPVTVSWNSGALTSGVHTFPAVLQSSGLYSLSSVVTVPSSSLGTQTYICNVNHKPSNTKVDKKVEPKSCDKTHTCPPCPAPELLGGPSVFLFPPKPKDTYITRETPEVTCVVVDVSHEDPEVKFNWYVDGVEVHNAKTKPREEQYGSTYRVVSVLTVLHQDWLNGKEYKCKVSNKALPAPIEKTISKAKGQPREPQVYTLPPSRDELTKNQVSLSCAVKGFYPSDIAVEWESNGQPENNYKTTPPVLDSDGSFFLVSKLTVDKSRWQQGNVFSCSVMHEALHNHYTQKSLSLSPGK

SEQ ID NO: 653 - protein, 453 aa, artificial
  Synthetic polypeptide
ELQLQESGPGLVKPSETLSLTCTVSGGSISNSSYYWGWIRQPPGKGLEWIGSIYYTGNTYYLPSLKSRVTISVDTSKNQFSLKLSSVTAADTAVYYCARVRYGVGVPRYFDPWGQGTLVTVSSASTKGPSVFPLAPSSKSTSGGTAALGCLVKDYFPEPVTVSWNSGALTSGVHTFPAVLQSSGLYSLSSVVTVPSSSLGTQTYICNVNHKPSNTKVDKKVEPKSCDKTHTCPPCPAPELLGGPSVFLFPPKPKDTLMISRTPEVTCVVVDVSHEDPEVKFNWYVDGVEVHNAKTKPREEQYGSTYRVVSVLTVLHQDWLNGKEYKCKVSNKALPAPIEKTISKAKGQPREPQVYTLPPSRDELTKNQVSLTCLVKGFYPSDIAVEWESNGQPENNYKTTPPVLDSDGSFFLYSKLTVDKSRWQQGNVFSCSVMHEALHNHYTQKSLSLSPGK

SEQ ID NO: 654 - protein, 452 aa, artificial
  Synthetic polypeptide
ELQLQESGPGLVKPSETLSLTCTVSGGSISNSSYYWGWIRQPPGKGLEWIGSIYYTGNTYYLPSLKSRVTISVDTSKNQFSLKLSSVTAADTAVYYCARVRYGVGVPRYFDPWGQGTLVTVSSASTKGPSVFPLAPSSKSTSGGTAALGCLVKDYFPEPVTVSWNSGALTSGVHTFPAVLQSSGLYSLSSVVTVPSSSLGTQTYICNVNHKPSNTKVDKKVEPKSCDKTHTCPPCPAPELLGGPSVFLFPPKPKDTYITRETPEVTCVVVDVSHEDPEVKFNWYVDGVEVHNAKTKPREEQYGSTYRVVSVLTVLHQDWLNGKEYKCKVSNKALPAPIEKTISKAKGQPREPQVYTLPPSRDELTKNQVSLTCLVKGFYPSDIAVEWESNGQPENNYKTTPPVLDSDGSFFLYSKLTVDKSRWQQGNVFSCSVMHEALHNHYTQKSLSLSPG

SEQ ID NO: 655 - protein, 453 aa, artificial
  Synthetic polypeptide
ELQLQESGPGLVKPSETLSLTCTVSGGSISNSSYYWGWIRQPPGKGLEWIGSIYYTGNTYYLPSLKSRVTISVDTSKNQFSLKLSSVTAADTAVYYCARVRYGVGVPRYFDPWGQGTLVTVSSASTKGPSVFPLAPSSKSTSGGTAALGCLVKDYFPEPVTVSWNSGALTSGVHTFPAVLQSSGLYSLSSVVTVPSSSLGTQTYICNVNHKPSNTKVDKKVEPKSCDKTHTCPPCPAPELLGGPSVFLFPPKPKDTYITRETPEVTCVVVDVSHEDPEVKFNWYVDGVEVHNAKTKPREEQYGSTYRVVSVLTVLHQDWLNGKEYKCKVSNKALPAPIEKTISKAKGQPREPQVYTLPPSRDELTKNQVSLTCLVKGFYPSDIAVEWESNGQPENNYKTTPPVLDSDGSFFLYSKLTVDKSRWQQGNVFSCSVMHEALHNHYTQKSLSLSPGK

SEQ ID NO: 656 - protein, 453 aa, artificial
  Synthetic polypeptide
ELQLQESGPGLVKPSETLSLTCTVSGGSISNSSYYWGWIRQPPGKGLEWIGSIYYTGNTYYLPSLKSRVTISVDTSKNQFSLKLSSVTAADTAVYYCARVRYGVGVPRYFDPWGQGTLVTVSSASTKGPSVFPLAPSSKSTSGGTAALGCLVKDYFPEPVTVSWNSGALTSGVHTFPAVLQSSGLYSLSSVVTVPSSSLGTQTYICNVNHKPSNTKVDKKVEPKSCDKTHTCPPCPAPELLGGPSVFLFPPKPKDTLMISRTPEVTCVVVDVSHEDPEVKFNWYVDGVEVHNAKTKPREEQYGSTYRVVSVLTVLHQDWLNGKEYKCKVSNKALPAPIEKTISKAKGQPREPQVYTLPPSRDELTKNQVSLWCLVKGFYPSDIAVEWESNGQPENNYKTTPPVLDSDGSFFLYSKLTVDKSRWQQGNVFSCSVMHEALHNHYTQKSLSLSPGK

SEQ ID NO: 657 - protein, 452 aa, artificial
  Synthetic polypeptide
ELQLQESGPGLVKPSETLSLTCTVSGGSISNSSYYWGWIRQPPGKGLEWIGSIYYTGNTYYLPSLKSRVTISVDTSKNQFSLKLSSVTAADTAVYYCARVRYGVGVPRYFDPWGQGTLVTVSSASTKGPSVFPLAPSSKSTSGGTAALGCLVKDYFPEPVTVSWNSGALTSGVHTFPAVLQSSGLYSLSSVVTVPSSSLGTQTYICNVNHKPSNTKVDKKVEPKSCDKTHTCPPCPAPELLGGPSVFLFPPKPKDTYITRETPEVTCVVVDVSHEDPEVKFNWYVDGVEVHNAKTKPREEQYGSTYRVVSVLTVLHQDWLNGKEYKCKVSNKALPAPIEKTISKAKGQPREPQVYTLPPSRDELTKNQVSLWCLVKGFYPSDIAVEWESNGQPENNYKTTPPVLDSDGSFFLYSKLTVDKSRWQQGNVFSCSVMHEALHNHYTQKSLSLSPG

SEQ ID NO: 658 - protein, 453 aa, artificial
  Synthetic polypeptide
ELQLQESGPGLVKPSETLSLTCTVSGGSISNSSYYWGWIRQPPGKGLEWIGSIYYTGNTYYLPSLKSRVTISVDTSKNQFSLKLSSVTAADTAVYYCARVRYGVGVPRYFDPWGQGTLVTVSSASTKGPSVFPLAPSSKSTSGGTAALGCLVKDYFPEPVTVSWNSGALTSGVHTFPAVLQSSGLYSLSSVVTVPSSSLGTQTYICNVNHKPSNTKVDKKVEPKSCDKTHTCPPCPAPELLGGPSVFLFPPKPKDTYITRETPEVTCVVVDVSHEDPEVKFNWYVDGVEVHNAKTKPREEQYGSTYRVVSVLTVLHQDWLNGKEYKCKVSNKALPAPIEKTISKAKGQPREPQVYTLPPSRDELTKNQVSLWCLVKGFYPSDIAVEWESNGQPENNYKTTPPVLDSDGSFFLYSKLTVDKSRWQQGNVFSCSVMHEALHNHYTQKSLSLSPGK

SEQ ID NO: 659 - protein, 453 aa, artificial
  Synthetic polypeptide
ELQLQESGPGLVKPSETLSLTCTVSGGSISNSSYYWGWIRQPPGKGLEWIGSIYYTGNTYYLPSLKSRVTISVDTSKNQFSLKLSSVTAADTAVYYCARVRYGVGVPRYFDPWGQGTLVTVSSASTKGPSVFPLAPSSKSTSGGTAALGCLVKDYFPEPVTVSWNSGALTSGVHTFPAVLQSSGLYSLSSVVTVPSSSLGTQTYICNVNHKPSNTKVDKKVEPKSCDKTHTCPPCPAPELLGGPSVFLFPPKPKDTLMISRTPEVTCVVVDVSHEDPEVKFNWYVDGVEVHNAKTKPREEQYGSTYRVVSVLTVLHQDWLNGKEYKCKVSNKALPAPIEKTISKAKGQPREPQVYTLPPSRDELTKNQVSLSCAVKGFYPSDIAVEWESNGQPENNYKTTPPVLDSDGSFFLVSKLTVDKSRWQQGNVFSCSVMHEALHNHYTQKSLSLSPGK

SEQ ID NO: 660 - protein, 452 aa, artificial
  Synthetic polypeptide
ELQLQESGPGLVKPSETLSLTCTVSGGSISNSSYYWGWIRQPPGKGLEWIGSIYYTGNTYYLPSLKSRVTISVDTSKNQFSLKLSSVTAADTAVYYCARVRYGVGVPRYFDPWGQGTLVTVSSASTKGPSVFPLAPSSKSTSGGTAALGCLVKDYFPEPVTVSWNSGALTSGVHTFPAVLQSSGLYSLSSVVTVPSSSLGTQTYICNVNHKPSNTKVDKKVEPKSCDKTHTCPPCPAPELLGGPSVFLFPPKPKDTYITRETPEVTCVVVDVSHEDPEVKFNWYVDGVEVHNAKTKPREEQYGSTYRVVSVLTVLHQDWLNGKEYKCKVSNKALPAPIEKTISKAKGQPREPQVYTLPPSRDELTKNQVSLSCAVKGFYPSDIAVEWESNGQPENNYKTTPPVLDSDGSFFLVSKLTVDKSRWQQGNVFSCSVMHEALHNHYTQKSLSLSPG

SEQ ID NO: 661 - protein, 453 aa, artificial
  Synthetic polypeptide
ELQLQESGPGLVKPSETLSLTCTVSGGSISNSSYYWGWIRQPPGKGLEWIGSIYYTGNTYYLPSLKSRVTISVDTSKNQFSLKLSSVTAADTAVYYCARVRYGVGVPRYFDPWGQGTLVTVSSASTKGPSVFPLAPSSKSTSGGTAALGCLVKDYFPEPVTVSWNSGALTSGVHTFPAVLQSSGLYSLSSVVTVPSSSLGTQTYICNVNHKPSNTKVDKKVEPKSCDKTHTCPPCPAPELLGGPSVFLFPPKPKDTYITRETPEVTCVVVDVSHEDPEVKFNWYVDGVEVHNAKTKPREEQYGSTYRVVSVLTVLHQDWLNGKEYKCKVSNKALPAPIEKTISKAKGQPREPQVYTLPPSRDELTKNQVSLSCAVKGFYPSDIAVEWESNGQPENNYKTTPPVLDSDGSFFLVSKLTVDKSRWQQGNVFSCSVMHEALHNHYTQKSLSLSPGK

SEQ ID NO: 662 - protein, 453 aa, artificial
  Synthetic polypeptide
ELQLQESGPGLVKPSETLSLTCTVSGGSISESSYYWGWIRQPPGKGLEWIGSIYYTGNTYYLPSLKSRVTISVDTSKNQFSLKLSSVTAADTAVYYCARVRYGVGVPRYFDPWGQGTLVTVSSASTKGPSVFPLAPSSKSTSGGTAALGCLVKDYFPEPVTVSWNSGALTSGVHTFPAVLQSSGLYSLSSVVTVPSSSLGTQTYICNVNHKPSNTKVDKKVEPKSCDKTHTCPPCPAPELLGGPSVFLFPPKPKDTLMISRTPEVTCVVVDVSHEDPEVKFNWYVDGVEVHNAKTKPREEQYGSTYRVVSVLTVLHQDWLNGKEYKCKVSNKALPAPIEKTISKAKGQPREPQVYTLPPSRDELTKNQVSLTCLVKGFYPSDIAVEWESNGQPENNYKTTPPVLDSDGSFFLYSKLTVDKSRWQQGNVFSCSVMHEALHNHYTQKSLSLSPGK

SEQ ID NO: 663 - protein, 452 aa, artificial
  Synthetic polypeptide
ELQLQESGPGLVKPSETLSLTCTVSGGSISESSYYWGWIRQPPGKGLEWIGSIYYTGNTYYLPSLKSRVTISVDTSKNQFSLKLSSVTAADTAVYYCARVRYGVGVPRYFDPWGQGTLVTVSSASTKGPSVFPLAPSSKSTSGGTAALGCLVKDYFPEPVTVSWNSGALTSGVHTFPAVLQSSGLYSLSSVVTVPSSSLGTQTYICNVNHKPSNTKVDKKVEPKSCDKTHTCPPCPAPELLGGPSVFLFPPKPKDTYITRETPEVTCVVVDVSHEDPEVKFNWYVDGVEVHNAKTKPREEQYGSTYRVVSVLTVLHQDWLNGKEYKCKVSNKALPAPIEKTISKAKGQPREPQVYTLPPSRDELTKNQVSLTCLVKGFYPSDIAVEWESNGQPENNYKTTPPVLDSDGSFFLYSKLTVDKSRWQQGNVFSCSVMHEALHNHYTQKSLSLSPG

SEQ ID NO: 664 - protein, 453 aa, artificial
  Synthetic polypeptide
ELQLQESGPGLVKPSETLSLTCTVSGGSISESSYYWGWIRQPPGKGLEWIGSIYYTGNTYYLPSLKSRVTISVDTSKNQFSLKLSSVTAADTAVYYCARVRYGVGVPRYFDPWGQGTLVTVSSASTKGPSVFPLAPSSKSTSGGTAALGCLVKDYFPEPVTVSWNSGALTSGVHTFPAVLQSSGLYSLSSVVTVPSSSLGTQTYICNVNHKPSNTKVDKKVEPKSCDKTHTCPPCPAPELLGGPSVFLFPPKPKDTYITRETPEVTCVVVDVSHEDPEVKFNWYVDGVEVHNAKTKPREEQYGSTYRVVSVLTVLHQDWLNGKEYKCKVSNKALPAPIEKTISKAKGQPREPQVYTLPPSRDELTKNQVSLTCLVKGFYPSDIAVEWESNGQPENNYKTTPPVLDSDGSFFLYSKLTVDKSRWQQGNVFSCSVMHEALHNHYTQKSLSLSPGK

SEQ ID NO: 665 - protein, 453 aa, artificial
  Synthetic polypeptide
ELQLQESGPGLVKPSETLSLTCTVSGGSISESSYYWGWIRQPPGKGLEWIGSIYYTGNTYYLPSLKSRVTISVDTSKNQFSLKLSSVTAADTAVYYCARVRYGVGVPRYFDPWGQGTLVTVSSASTKGPSVFPLAPSSKSTSGGTAALGCLVKDYFPEPVTVSWNSGALTSGVHTFPAVLQSSGLYSLSSVVTVPSSSLGTQTYICNVNHKPSNTKVDKKVEPKSCDKTHTCPPCPAPELLGGPSVFLFPPKPKDTLMISRTPEVTCVVVDVSHEDPEVKFNWYVDGVEVHNAKTKPREEQYGSTYRVVSVLTVLHQDWLNGKEYKCKVSNKALPAPIEKTISKAKGQPREPQVYTLPPSRDELTKNQVSLWCLVKGFYPSDIAVEWESNGQPENNYKTTPPVLDSDGSFFLYSKLTVDKSRWQQGNVFSCSVMHEALHNHYTQKSLSLSPGK

SEQ ID NO: 666 - protein, 452 aa, artificial
  Synthetic polypeptide
ELQLQESGPGLVKPSETLSLTCTVSGGSISESSYYWGWIRQPPGKGLEWIGSIYYTGNTYYLPSLKSRVTISVDTSKNQFSLKLSSVTAADTAVYYCARVRYGVGVPRYFDPWGQGTLVTVSSASTKGPSVFPLAPSSKSTSGGTAALGCLVKDYFPEPVTVSWNSGALTSGVHTFPAVLQSSGLYSLSSVVTVPSSSLGTQTYICNVNHKPSNTKVDKKVEPKSCDKTHTCPPCPAPELLGGPSVFLFPPKPKDTYITRETPEVTCVVVDVSHEDPEVKFNWYVDGVEVHNAKTKPREEQYGSTYRVVSVLTVLHQDWLNGKEYKCKVSNKALPAPIEKTISKAKGQPREPQVYTLPPSRDELTKNQVSLWCLVKGFYPSDIAVEWESNGQPENNYKTTPPVLDSDGSFFLYSKLTVDKSRWQQGNVFSCSVMHEALHNHYTQKSLSLSPG

SEQ ID NO: 667 - protein, 453 aa, artificial
  Synthetic polypeptide
ELQLQESGPGLVKPSETLSLTCTVSGGSISESSYYWGWIRQPPGKGLEWIGSIYYTGNTYYLPSLKSRVTISVDTSKNQFSLKLSSVTAADTAVYYCARVRYGVGVPRYFDPWGQGTLVTVSSASTKGPSVFPLAPSSKSTSGGTAALGCLVKDYFPEPVTVSWNSGALTSGVHTFPAVLQSSGLYSLSSVVTVPSSSLGTQTYICNVNHKPSNTKVDKKVEPKSCDKTHTCPPCPAPELLGGPSVFLFPPKPKDTYITRETPEVTCVVVDVSHEDPEVKFNWYVDGVEVHNAKTKPREEQYGSTYRVVSVLTVLHQDWLNGKEYKCKVSNKALPAPIEKTISKAKGQPREPQVYTLPPSRDELTKNQVSLWCLVKGFYPSDIAVEWESNGQPENNYKTTPPVLDSDGSFFLYSKLTVDKSRWQQGNVFSCSVMHEALHNHYTQKSLSLSPGK

SEQ ID NO: 668 - protein, 453 aa, artificial
  Synthetic polypeptide
ELQLQESGPGLVKPSETLSLTCTVSGGSISESSYYWGWIRQPPGKGLEWIGSIYYTGNTYYLPSLKSRVTISVDTSKNQFSLKLSSVTAADTAVYYCARVRYGVGVPRYFDPWGQGTLVTVSSASTKGPSVFPLAPSSKSTSGGTAALGCLVKDYFPEPVTVSWNSGALTSGVHTFPAVLQSSGLYSLSSVVTVPSSSLGTQTYICNVNHKPSNTKVDKKVEPKSCDKTHTCPPCPAPELLGGPSVFLFPPKPKDTLMISRTPEVTCVVVDVSHEDPEVKFNWYVDGVEVHNAKTKPREEQYGSTYRVVSVLTVLHQDWLNGKEYKCKVSNKALPAPIEKTISKAKGQPREPQVYTLPPSRDELTKNQVSLSCAVKGFYPSDIAVEWESNGQPENNYKTTPPVLDSDGSFFLVSKLTVDKSRWQQGNVFSCSVMHEALHNHYTQKSLSLSPGK

SEQ ID NO: 669 - protein, 452 aa, artificial
  Synthetic polypeptide
ELQLQESGPGLVKPSETLSLTCTVSGGSISESSYYWGWIRQPPGKGLEWIGSIYYTGNTYYLPSLKSRVTISVDTSKNQFSLKLSSVTAADTAVYYCARVRYGVGVPRYFDPWGQGTLVTVSSASTKGPSVFPLAPSSKSTSGGTAALGCLVKDYFPEPVTVSWNSGALTSGVHTFPAVLQSSGLYSLSSVVTVPSSSLGTQTYICNVNHKPSNTKVDKKVEPKSCDKTHTCPPCPAPELLGGPSVFLFPPKPKDTYITRETPEVTCVVVDVSHEDPEVKFNWYVDGVEVHNAKTKPREEQYGSTYRVVSVLTVLHQDWLNGKEYKCKVSNKALPAPIEKTISKAKGQPREPQVYTLPPSRDELTKNQVSLSCAVKGFYPSDIAVEWESNGQPENNYKTTPPVLDSDGSFFLVSKLTVDKSRWQQGNVFSCSVMHEALHNHYTQKSLSLSPG

SEQ ID NO: 670 - protein, 453 aa, artificial
  Synthetic polypeptide
ELQLQESGPGLVKPSETLSLTCTVSGGSISESSYYWGWIRQPPGKGLEWIGSIYYTGNTYYLPSLKSRVTISVDTSKNQFSLKLSSVTAADTAVYYCARVRYGVGVPRYFDPWGQGTLVTVSSASTKGPSVFPLAPSSKSTSGGTAALGCLVKDYFPEPVTVSWNSGALTSGVHTFPAVLQSSGLYSLSSVVTVPSSSLGTQTYICNVNHKPSNTKVDKKVEPKSCDKTHTCPPCPAPELLGGPSVFLFPPKPKDTYITRETPEVTCVVVDVSHEDPEVKFNWYVDGVEVHNAKTKPREEQYGSTYRVVSVLTVLHQDWLNGKEYKCKVSNKALPAPIEKTISKAKGQPREPQVYTLPPSRDELTKNQVSLSCAVKGFYPSDIAVEWESNGQPENNYKTTPPVLDSDGSFFLVSKLTVDKSRWQQGNVFSCSVMHEALHNHYTQKSLSLSPGK

SEQ ID NO: 671 - protein, 453 aa, artificial
  Synthetic polypeptide
ELQLQESGPGLVKPSETLSLTCTVSGGSISTSSYHWGWIRQPPGKGLEWIGSIYYTGNTYYMPSLKSRVTISVDTSKNQFSLKLSSVTAADTAVYYCVRVRYGVGVPRYFDPWGQGTLVTVSSASTKGPSVFPLAPSSKSTSGGTAALGCLVKDYFPEPVTVSWNSGALTSGVHTFPAVLQSSGLYSLSSVVTVPSSSLGTQTYICNVNHKPSNTKVDKKVEPKSCDKTHTCPPCPAPELLGGPSVFLFPPKPKDTLMISRTPEVTCVVVDVSHEDPEVKFNWYVDGVEVHNAKTKPREEQYGSTYRVVSVLTVLHQDWLNGKEYKCKVSNKALPAPIEKTISKAKGQPREPQVYTLPPSRDELTKNQVSLTCLVKGFYPSDIAVEWESNGQPENNYKTTPPVLDSDGSFFLYSKLTVDKSRWQQGNVFSCSVMHEALHNHYTQKSLSLSPGK

SEQ ID NO: 672 - protein, 452 aa, artificial
  Synthetic polypeptide
ELQLQESGPGLVKPSETLSLTCTVSGGSISTSSYHWGWIRQPPGKGLEWIGSIYYTGNTYYMPSLKSRVTISVDTSKNQFSLKLSSVTAADTAVYYCVRVRYGVGVPRYFDPWGQGTLVTVSSASTKGPSVFPLAPSSKSTSGGTAALGCLVKDYFPEPVTVSWNSGALTSGVHTFPAVLQSSGLYSLSSVVTVPSSSLGTQTYICNVNHKPSNTKVDKKVEPKSCDKTHTCPPCPAPELLGGPSVFLFPPKPKDTYITRETPEVTCVVVDVSHEDPEVKFNWYVDGVEVHNAKTKPREEQYGSTYRVVSVLTVLHQDWLNGKEYKCKVSNKALPAPIEKTISKAKGQPREPQVYTLPPSRDELTKNQVSLTCLVKGFYPSDIAVEWESNGQPENNYKTTPPVLDSDGSFFLYSKLTVDKSRWQQGNVFSCSVMHEALHNHYTQKSLSLSPG

SEQ ID NO: 673 - protein, 453 aa, artificial
  Synthetic polypeptide
ELQLQESGPGLVKPSETLSLTCTVSGGSISTSSYHWGWIRQPPGKGLEWIGSIYYTGNTYYMPSLKSRVTISVDTSKNQFSLKLSSVTAADTAVYYCVRVRYGVGVPRYFDPWGQGTLVTVSSASTKGPSVFPLAPSSKSTSGGTAALGCLVKDYFPEPVTVSWNSGALTSGVHTFPAVLQSSGLYSLSSVVTVPSSSLGTQTYICNVNHKPSNTKVDKKVEPKSCDKTHTCPPCPAPELLGGPSVFLFPPKPKDTYITRETPEVTCVVVDVSHEDPEVKFNWYVDGVEVHNAKTKPREEQYGSTYRVVSVLTVLHQDWLNGKEYKCKVSNKALPAPIEKTISKAKGQPREPQVYTLPPSRDELTKNQVSLTCLVKGFYPSDIAVEWESNGQPENNYKTTPPVLDSDGSFFLYSKLTVDKSRWQQGNVFSCSVMHEALHNHYTQKSLSLSPGK

SEQ ID NO: 674 - protein, 453 aa, artificial
  Synthetic polypeptide
ELQLQESGPGLVKPSETLSLTCTVSGGSISTSSYHWGWIRQPPGKGLEWIGSIYYTGNTYYMPSLKSRVTISVDTSKNQFSLKLSSVTAADTAVYYCVRVRYGVGVPRYFDPWGQGTLVTVSSASTKGPSVFPLAPSSKSTSGGTAALGCLVKDYFPEPVTVSWNSGALTSGVHTFPAVLQSSGLYSLSSVVTVPSSSLGTQTYICNVNHKPSNTKVDKKVEPKSCDKTHTCPPCPAPELLGGPSVFLFPPKPKDTLMISRTPEVTCVVVDVSHEDPEVKFNWYVDGVEVHNAKTKPREEQYGSTYRVVSVLTVLHQDWLNGKEYKCKVSNKALPAPIEKTISKAKGQPREPQVYTLPPSRDELTKNQVSLWCLVKGFYPSDIAVEWESNGQPENNYKTTPPVLDSDGSFFLYSKLTVDKSRWQQGNVFSCSVMHEALHNHYTQKSLSLSPGK

SEQ ID NO: 675 - protein, 452 aa, artificial
  Synthetic polypeptide
ELQLQESGPGLVKPSETLSLTCTVSGGSISTSSYHWGWIRQPPGKGLEWIGSIYYTGNTYYMPSLKSRVTISVDTSKNQFSLKLSSVTAADTAVYYCVRVRYGVGVPRYFDPWGQGTLVTVSSASTKGPSVFPLAPSSKSTSGGTAALGCLVKDYFPEPVTVSWNSGALTSGVHTFPAVLQSSGLYSLSSVVTVPSSSLGTQTYICNVNHKPSNTKVDKKVEPKSCDKTHTCPPCPAPELLGGPSVFLFPPKPKDTYITRETPEVTCVVVDVSHEDPEVKFNWYVDGVEVHNAKTKPREEQYGSTYRVVSVLTVLHQDWLNGKEYKCKVSNKALPAPIEKTISKAKGQPREPQVYTLPPSRDELTKNQVSLWCLVKGFYPSDIAVEWESNGQPENNYKTTPPVLDSDGSFFLYSKLTVDKSRWQQGNVFSCSVMHEALHNHYTQKSLSLSPG

SEQ ID NO: 676 - protein, 453 aa, artificial
  Synthetic polypeptide
ELQLQESGPGLVKPSETLSLTCTVSGGSISTSSYHWGWIRQPPGKGLEWIGSIYYTGNTYYMPSLKSRVTISVDTSKNQFSLKLSSVTAADTAVYYCVRVRYGVGVPRYFDPWGQGTLVTVSSASTKGPSVFPLAPSSKSTSGGTAALGCLVKDYFPEPVTVSWNSGALTSGVHTFPAVLQSSGLYSLSSVVTVPSSSLGTQTYICNVNHKPSNTKVDKKVEPKSCDKTHTCPPCPAPELLGGPSVFLFPPKPKDTYITRETPEVTCVVVDVSHEDPEVKFNWYVDGVEVHNAKTKPREEQYGSTYRVVSVLTVLHQDWLNGKEYKCKVSNKALPAPIEKTISKAKGQPREPQVYTLPPSRDELTKNQVSLWCLVKGFYPSDIAVEWESNGQPENNYKTTPPVLDSDGSFFLYSKLTVDKSRWQQGNVFSCSVMHEALHNHYTQKSLSLSPGK

SEQ ID NO: 677 - protein, 453 aa, artificial
  Synthetic polypeptide
ELQLQESGPGLVKPSETLSLTCTVSGGSISTSSYHWGWIRQPPGKGLEWIGSIYYTGNTYYMPSLKSRVTISVDTSKNQFSLKLSSVTAADTAVYYCVRVRYGVGVPRYFDPWGQGTLVTVSSASTKGPSVFPLAPSSKSTSGGTAALGCLVKDYFPEPVTVSWNSGALTSGVHTFPAVLQSSGLYSLSSVVTVPSSSLGTQTYICNVNHKPSNTKVDKKVEPKSCDKTHTCPPCPAPELLGGPSVFLFPPKPKDTLMISRTPEVTCVVVDVSHEDPEVKFNWYVDGVEVHNAKTKPREEQYGSTYRVVSVLTVLHQDWLNGKEYKCKVSNKALPAPIEKTISKAKGQPREPQVYTLPPSRDELTKNQVSLSCAVKGFYPSDIAVEWESNGQPENNYKTTPPVLDSDGSFFLVSKLTVDKSRWQQGNVFSCSVMHEALHNHYTQKSLSLSPGK

SEQ ID NO: 678 - protein, 452 aa, artificial
  Synthetic polypeptide
ELQLQESGPGLVKPSETLSLTCTVSGGSISTSSYHWGWIRQPPGKGLEWIGSIYYTGNTYYMPSLKSRVTISVDTSKNQFSLKLSSVTAADTAVYYCVRVRYGVGVPRYFDPWGQGTLVTVSSASTKGPSVFPLAPSSKSTSGGTAALGCLVKDYFPEPVTVSWNSGALTSGVHTFPAVLQSSGLYSLSSVVTVPSSSLGTQTYICNVNHKPSNTKVDKKVEPKSCDKTHTCPPCPAPELLGGPSVFLFPPKPKDTYITRETPEVTCVVVDVSHEDPEVKFNWYVDGVEVHNAKTKPREEQYGSTYRVVSVLTVLHQDWLNGKEYKCKVSNKALPAPIEKTISKAKGQPREPQVYTLPPSRDELTKNQVSLSCAVKGFYPSDIAVEWESNGQPENNYKTTPPVLDSDGSFFLVSKLTVDKSRWQQGNVFSCSVMHEALHNHYTQKSLSLSPG

SEQ ID NO: 679 - protein, 453 aa, artificial
  Synthetic polypeptide
ELQLQESGPGLVKPSETLSLTCTVSGGSISTSSYHWGWIRQPPGKGLEWIGSIYYTGNTYYMPSLKSRVTISVDTSKNQFSLKLSSVTAADTAVYYCVRVRYGVGVPRYFDPWGQGTLVTVSSASTKGPSVFPLAPSSKSTSGGTAALGCLVKDYFPEPVTVSWNSGALTSGVHTFPAVLQSSGLYSLSSVVTVPSSSLGTQTYICNVNHKPSNTKVDKKVEPKSCDKTHTCPPCPAPELLGGPSVFLFPPKPKDTYITRETPEVTCVVVDVSHEDPEVKFNWYVDGVEVHNAKTKPREEQYGSTYRVVSVLTVLHQDWLNGKEYKCKVSNKALPAPIEKTISKAKGQPREPQVYTLPPSRDELTKNQVSLSCAVKGFYPSDIAVEWESNGQPENNYKTTPPVLDSDGSFFLVSKLTVDKSRWQQGNVFSCSVMHEALHNHYTQKSLSLSPGK

SEQ ID NO: 680 - protein, 453 aa, artificial
  Synthetic polypeptide
ELQLQESGPGLVKPSETLSLTCTVSGGSISRSSYYWGWIRQPPGKGLEWIGSIYYTGNTYYWPSLKSRVTISVDTSKNQFSLKLSSVTAADTAVYYCTRVRYGVGVPRYFDPWGQGTLVTVSSASTKGPSVFPLAPSSKSTSGGTAALGCLVKDYFPEPVTVSWNSGALTSGVHTFPAVLQSSGLYSLSSVVTVPSSSLGTQTYICNVNHKPSNTKVDKKVEPKSCDKTHTCPPCPAPELLGGPSVFLFPPKPKDTLMISRTPEVTCVVVDVSHEDPEVKFNWYVDGVEVHNAKTKPREEQYGSTYRVVSVLTVLHQDWLNGKEYKCKVSNKALPAPIEKTISKAKGQPREPQVYTLPPSRDELTKNQVSLTCLVKGFYPSDIAVEWESNGQPENNYKTTPPVLDSDGSFFLYSKLTVDKSRWQQGNVFSCSVMHEALHNHYTQKSLSLSPGK

SEQ ID NO: 681 - protein, 452 aa, artificial
  Synthetic polypeptide
ELQLQESGPGLVKPSETLSLTCTVSGGSISRSSYYWGWIRQPPGKGLEWIGSIYYTGNTYYWPSLKSRVTISVDTSKNQFSLKLSSVTAADTAVYYCTRVRYGVGVPRYFDPWGQGTLVTVSSASTKGPSVFPLAPSSKSTSGGTAALGCLVKDYFPEPVTVSWNSGALTSGVHTFPAVLQSSGLYSLSSVVTVPSSSLGTQTYICNVNHKPSNTKVDKKVEPKSCDKTHTCPPCPAPELLGGPSVFLFPPKPKDTYITRETPEVTCVVVDVSHEDPEVKFNWYVDGVEVHNAKTKPREEQYGSTYRVVSVLTVLHQDWLNGKEYKCKVSNKALPAPIEKTISKAKGQPREPQVYTLPPSRDELTKNQVSLTCLVKGFYPSDIAVEWESNGQPENNYKTTPPVLDSDGSFFLYSKLTVDKSRWQQGNVFSCSVMHEALHNHYTQKSLSLSPG

SEQ ID NO: 682 - protein, 453 aa, artificial
  Synthetic polypeptide
ELQLQESGPGLVKPSETLSLTCTVSGGSISRSSYYWGWIRQPPGKGLEWIGSIYYTGNTYYWPSLKSRVTISVDTSKNQFSLKLSSVTAADTAVYYCTRVRYGVGVPRYFDPWGQGTLVTVSSASTKGPSVFPLAPSSKSTSGGTAALGCLVKDYFPEPVTVSWNSGALTSGVHTFPAVLQSSGLYSLSSVVTVPSSSLGTQTYICNVNHKPSNTKVDKKVEPKSCDKTHTCPPCPAPELLGGPSVFLFPPKPKDTYITRETPEVTCVVVDVSHEDPEVKFNWYVDGVEVHNAKTKPREEQYGSTYRVVSVLTVLHQDWLNGKEYKCKVSNKALPAPIEKTISKAKGQPREPQVYTLPPSRDELTKNQVSLTCLVKGFYPSDIAVEWESNGQPENNYKTTPPVLDSDGSFFLYSKLTVDKSRWQQGNVFSCSVMHEALHNHYTQKSLSLSPGK

SEQ ID NO: 683 - protein, 453 aa, artificial
  Synthetic polypeptide
ELQLQESGPGLVKPSETLSLTCTVSGGSISRSSYYWGWIRQPPGKGLEWIGSIYYTGNTYYWPSLKSRVTISVDTSKNQFSLKLSSVTAADTAVYYCTRVRYGVGVPRYFDPWGQGTLVTVSSASTKGPSVFPLAPSSKSTSGGTAALGCLVKDYFPEPVTVSWNSGALTSGVHTFPAVLQSSGLYSLSSVVTVPSSSLGTQTYICNVNHKPSNTKVDKKVEPKSCDKTHTCPPCPAPELLGGPSVFLFPPKPKDTLMISRTPEVTCVVVDVSHEDPEVKFNWYVDGVEVHNAKTKPREEQYGSTYRVVSVLTVLHQDWLNGKEYKCKVSNKALPAPIEKTISKAKGQPREPQVYTLPPSRDELTKNQVSLWCLVKGFYPSDIAVEWESNGQPENNYKTTPPVLDSDGSFFLYSKLTVDKSRWQQGNVFSCSVMHEALHNHYTQKSLSLSPGK

SEQ ID NO: 684 - protein, 452 aa, artificial
  Synthetic polypeptide
ELQLQESGPGLVKPSETLSLTCTVSGGSISRSSYYWGWIRQPPGKGLEWIGSIYYTGNTYYWPSLKSRVTISVDTSKNQFSLKLSSVTAADTAVYYCTRVRYGVGVPRYFDPWGQGTLVTVSSASTKGPSVFPLAPSSKSTSGGTAALGCLVKDYFPEPVTVSWNSGALTSGVHTFPAVLQSSGLYSLSSVVTVPSSSLGTQTYICNVNHKPSNTKVDKKVEPKSCDKTHTCPPCPAPELLGGPSVFLFPPKPKDTYITRETPEVTCVVVDVSHEDPEVKFNWYVDGVEVHNAKTKPREEQYGSTYRVVSVLTVLHQDWLNGKEYKCKVSNKALPAPIEKTISKAKGQPREPQVYTLPPSRDELTKNQVSLWCLVKGFYPSDIAVEWESNGQPENNYKTTPPVLDSDGSFFLYSKLTVDKSRWQQGNVFSCSVMHEALHNHYTQKSLSLSPG

SEQ ID NO: 685 - protein, 453 aa, artificial
  Synthetic polypeptide
ELQLQESGPGLVKPSETLSLTCTVSGGSISRSSYYWGWIRQPPGKGLEWIGSIYYTGNTYYWPSLKSRVTISVDTSKNQFSLKLSSVTAADTAVYYCTRVRYGVGVPRYFDPWGQGTLVTVSSASTKGPSVFPLAPSSKSTSGGTAALGCLVKDYFPEPVTVSWNSGALTSGVHTFPAVLQSSGLYSLSSVVTVPSSSLGTQTYICNVNHKPSNTKVDKKVEPKSCDKTHTCPPCPAPELLGGPSVFLFPPKPKDTYITRETPEVTCVVVDVSHEDPEVKFNWYVDGVEVHNAKTKPREEQYGSTYRVVSVLTVLHQDWLNGKEYKCKVSNKALPAPIEKTISKAKGQPREPQVYTLPPSRDELTKNQVSLWCLVKGFYPSDIAVEWESNGQPENNYKTTPPVLDSDGSFFLYSKLTVDKSRWQQGNVFSCSVMHEALHNHYTQKSLSLSPGK

SEQ ID NO: 686 - protein, 453 aa, artificial
  Synthetic polypeptide
ELQLQESGPGLVKPSETLSLTCTVSGGSISRSSYYWGWIRQPPGKGLEWIGSIYYTGNTYYWPSLKSRVTISVDTSKNQFSLKLSSVTAADTAVYYCTRVRYGVGVPRYFDPWGQGTLVTVSSASTKGPSVFPLAPSSKSTSGGTAALGCLVKDYFPEPVTVSWNSGALTSGVHTFPAVLQSSGLYSLSSVVTVPSSSLGTQTYICNVNHKPSNTKVDKKVEPKSCDKTHTCPPCPAPELLGGPSVFLFPPKPKDTLMISRTPEVTCVVVDVSHEDPEVKFNWYVDGVEVHNAKTKPREEQYGSTYRVVSVLTVLHQDWLNGKEYKCKVSNKALPAPIEKTISKAKGQPREPQVYTLPPSRDELTKNQVSLSCAVKGFYPSDIAVEWESNGQPENNYKTTPPVLDSDGSFFLVSKLTVDKSRWQQGNVFSCSVMHEALHNHYTQKSLSLSPGK

SEQ ID NO: 687 - protein, 452 aa, artificial
  Synthetic polypeptide
ELQLQESGPGLVKPSETLSLTCTVSGGSISRSSYYWGWIRQPPGKGLEWIGSIYYTGNTYYWPSLKSRVTISVDTSKNQFSLKLSSVTAADTAVYYCTRVRYGVGVPRYFDPWGQGTLVTVSSASTKGPSVFPLAPSSKSTSGGTAALGCLVKDYFPEPVTVSWNSGALTSGVHTFPAVLQSSGLYSLSSVVTVPSSSLGTQTYICNVNHKPSNTKVDKKVEPKSCDKTHTCPPCPAPELLGGPSVFLFPPKPKDTYITRETPEVTCVVVDVSHEDPEVKFNWYVDGVEVHNAKTKPREEQYGSTYRVVSVLTVLHQDWLNGKEYKCKVSNKALPAPIEKTISKAKGQPREPQVYTLPPSRDELTKNQVSLSCAVKGFYPSDIAVEWESNGQPENNYKTTPPVLDSDGSFFLVSKLTVDKSRWQQGNVFSCSVMHEALHNHYTQKSLSLSPG

SEQ ID NO: 688 - protein, 453 aa, artificial
  Synthetic polypeptide
ELQLQESGPGLVKPSETLSLTCTVSGGSISRSSYYWGWIRQPPGKGLEWIGSIYYTGNTYYWPSLKSRVTISVDTSKNQFSLKLSSVTAADTAVYYCTRVRYGVGVPRYFDPWGQGTLVTVSSASTKGPSVFPLAPSSKSTSGGTAALGCLVKDYFPEPVTVSWNSGALTSGVHTFPAVLQSSGLYSLSSVVTVPSSSLGTQTYICNVNHKPSNTKVDKKVEPKSCDKTHTCPPCPAPELLGGPSVFLFPPKPKDTYITRETPEVTCVVVDVSHEDPEVKFNWYVDGVEVHNAKTKPREEQYGSTYRVVSVLTVLHQDWLNGKEYKCKVSNKALPAPIEKTISKAKGQPREPQVYTLPPSRDELTKNQVSLSCAVKGFYPSDIAVEWESNGQPENNYKTTPPVLDSDGSFFLVSKLTVDKSRWQQGNVFSCSVMHEALHNHYTQKSLSLSPGK

SEQ ID NO: 689 - protein, 453 aa, artificial
  Synthetic polypeptide
ELQLQESGPGLVKPSETLSLTCTVSGGSISDSSYYWGWIRQPPGKGLEWIGSIYYTGETYYAPSLKSRVTISVDTSKNQFSLKLSSVTAADTAVYYCARLRYGVGVPRYFDPWGQGTLVTVSSASTKGPSVFPLAPSSKSTSGGTAALGCLVKDYFPEPVTVSWNSGALTSGVHTFPAVLQSSGLYSLSSVVTVPSSSLGTQTYICNVNHKPSNTKVDKKVEPKSCDKTHTCPPCPAPELLGGPSVFLFPPKPKDTLMISRTPEVTCVVVDVSHEDPEVKFNWYVDGVEVHNAKTKPREEQYGSTYRVVSVLTVLHQDWLNGKEYKCKVSNKALPAPIEKTISKAKGQPREPQVYTLPPSRDELTKNQVSLTCLVKGFYPSDIAVEWESNGQPENNYKTTPPVLDSDGSFFLYSKLTVDKSRWQQGNVFSCSVMHEALHNHYTQKSLSLSPGK

SEQ ID NO: 690 - protein, 452 aa, artificial
  Synthetic polypeptide
ELQLQESGPGLVKPSETLSLTCTVSGGSISDSSYYWGWIRQPPGKGLEWIGSIYYTGETYYAPSLKSRVTISVDTSKNQFSLKLSSVTAADTAVYYCARLRYGVGVPRYFDPWGQGTLVTVSSASTKGPSVFPLAPSSKSTSGGTAALGCLVKDYFPEPVTVSWNSGALTSGVHTFPAVLQSSGLYSLSSVVTVPSSSLGTQTYICNVNHKPSNTKVDKKVEPKSCDKTHTCPPCPAPELLGGPSVFLFPPKPKDTYITRETPEVTCVVVDVSHEDPEVKFNWYVDGVEVHNAKTKPREEQYGSTYRVVSVLTVLHQDWLNGKEYKCKVSNKALPAPIEKTISKAKGQPREPQVYTLPPSRDELTKNQVSLTCLVKGFYPSDIAVEWESNGQPENNYKTTPPVLDSDGSFFLYSKLTVDKSRWQQGNVFSCSVMHEALHNHYTQKSLSLSPG

SEQ ID NO: 691 - protein, 453 aa, artificial
  Synthetic polypeptide
ELQLQESGPGLVKPSETLSLTCTVSGGSISDSSYYWGWIRQPPGKGLEWIGSIYYTGETYYAPSLKSRVTISVDTSKNQFSLKLSSVTAADTAVYYCARLRYGVGVPRYFDPWGQGTLVTVSSASTKGPSVFPLAPSSKSTSGGTAALGCLVKDYFPEPVTVSWNSGALTSGVHTFPAVLQSSGLYSLSSVVTVPSSSLGTQTYICNVNHKPSNTKVDKKVEPKSCDKTHTCPPCPAPELLGGPSVFLFPPKPKDTYITRETPEVTCVVVDVSHEDPEVKFNWYVDGVEVHNAKTKPREEQYGSTYRVVSVLTVLHQDWLNGKEYKCKVSNKALPAPIEKTISKAKGQPREPQVYTLPPSRDELTKNQVSLTCLVKGFYPSDIAVEWESNGQPENNYKTTPPVLDSDGSFFLYSKLTVDKSRWQQGNVFSCSVMHEALHNHYTQKSLSLSPGK

SEQ ID NO: 692 - protein, 453 aa, artificial
  Synthetic polypeptide
ELQLQESGPGLVKPSETLSLTCTVSGGSISDSSYYWGWIRQPPGKGLEWIGSIYYTGETYYAPSLKSRVTISVDTSKNQFSLKLSSVTAADTAVYYCARLRYGVGVPRYFDPWGQGTLVTVSSASTKGPSVFPLAPSSKSTSGGTAALGCLVKDYFPEPVTVSWNSGALTSGVHTFPAVLQSSGLYSLSSVVTVPSSSLGTQTYICNVNHKPSNTKVDKKVEPKSCDKTHTCPPCPAPELLGGPSVFLFPPKPKDTLMISRTPEVTCVVVDVSHEDPEVKFNWYVDGVEVHNAKTKPREEQYGSTYRVVSVLTVLHQDWLNGKEYKCKVSNKALPAPIEKTISKAKGQPREPQVYTLPPSRDELTKNQVSLWCLVKGFYPSDIAVEWESNGQPENNYKTTPPVLDSDGSFFLYSKLTVDKSRWQQGNVFSCSVMHEALHNHYTQKSLSLSPGK

SEQ ID NO: 693 - protein, 452 aa, artificial
  Synthetic polypeptide
ELQLQESGPGLVKPSETLSLTCTVSGGSISDSSYYWGWIRQPPGKGLEWIGSIYYTGETYYAPSLKSRVTISVDTSKNQFSLKLSSVTAADTAVYYCARLRYGVGVPRYFDPWGQGTLVTVSSASTKGPSVFPLAPSSKSTSGGTAALGCLVKDYFPEPVTVSWNSGALTSGVHTFPAVLQSSGLYSLSSVVTVPSSSLGTQTYICNVNHKPSNTKVDKKVEPKSCDKTHTCPPCPAPELLGGPSVFLFPPKPKDTYITRETPEVTCVVVDVSHEDPEVKFNWYVDGVEVHNAKTKPREEQYGSTYRVVSVLTVLHQDWLNGKEYKCKVSNKALPAPIEKTISKAKGQPREPQVYTLPPSRDELTKNQVSLWCLVKGFYPSDIAVEWESNGQPENNYKTTPPVLDSDGSFFLYSKLTVDKSRWQQGNVFSCSVMHEALHNHYTQKSLSLSPG

SEQ ID NO: 694 - protein, 453 aa, artificial
  Synthetic polypeptide
ELQLQESGPGLVKPSETLSLTCTVSGGSISDSSYYWGWIRQPPGKGLEWIGSIYYTGETYYAPSLKSRVTISVDTSKNQFSLKLSSVTAADTAVYYCARLRYGVGVPRYFDPWGQGTLVTVSSASTKGPSVFPLAPSSKSTSGGTAALGCLVKDYFPEPVTVSWNSGALTSGVHTFPAVLQSSGLYSLSSVVTVPSSSLGTQTYICNVNHKPSNTKVDKKVEPKSCDKTHTCPPCPAPELLGGPSVFLFPPKPKDTYITRETPEVTCVVVDVSHEDPEVKFNWYVDGVEVHNAKTKPREEQYGSTYRVVSVLTVLHQDWLNGKEYKCKVSNKALPAPIEKTISKAKGQPREPQVYTLPPSRDELTKNQVSLWCLVKGFYPSDIAVEWESNGQPENNYKTTPPVLDSDGSFFLYSKLTVDKSRWQQGNVFSCSVMHEALHNHYTQKSLSLSPGK

SEQ ID NO: 695 - protein, 453 aa, artificial
  Synthetic polypeptide
ELQLQESGPGLVKPSETLSLTCTVSGGSISDSSYYWGWIRQPPGKGLEWIGSIYYTGETYYAPSLKSRVTISVDTSKNQFSLKLSSVTAADTAVYYCARLRYGVGVPRYFDPWGQGTLVTVSSASTKGPSVFPLAPSSKSTSGGTAALGCLVKDYFPEPVTVSWNSGALTSGVHTFPAVLQSSGLYSLSSVVTVPSSSLGTQTYICNVNHKPSNTKVDKKVEPKSCDKTHTCPPCPAPELLGGPSVFLFPPKPKDTLMISRTPEVTCVVVDVSHEDPEVKFNWYVDGVEVHNAKTKPREEQYGSTYRVVSVLTVLHQDWLNGKEYKCKVSNKALPAPIEKTISKAKGQPREPQVYTLPPSRDELTKNQVSLSCAVKGFYPSDIAVEWESNGQPENNYKTTPPVLDSDGSFFLVSKLTVDKSRWQQGNVFSCSVMHEALHNHYTQKSLSLSPGK

SEQ ID NO: 696 - protein, 452 aa, artificial
  Synthetic polypeptide
ELQLQESGPGLVKPSETLSLTCTVSGGSISDSSYYWGWIRQPPGKGLEWIGSIYYTGETYYAPSLKSRVTISVDTSKNQFSLKLSSVTAADTAVYYCARLRYGVGVPRYFDPWGQGTLVTVSSASTKGPSVFPLAPSSKSTSGGTAALGCLVKDYFPEPVTVSWNSGALTSGVHTFPAVLQSSGLYSLSSVVTVPSSSLGTQTYICNVNHKPSNTKVDKKVEPKSCDKTHTCPPCPAPELLGGPSVFLFPPKPKDTYITRETPEVTCVVVDVSHEDPEVKFNWYVDGVEVHNAKTKPREEQYGSTYRVVSVLTVLHQDWLNGKEYKCKVSNKALPAPIEKTISKAKGQPREPQVYTLPPSRDELTKNQVSLSCAVKGFYPSDIAVEWESNGQPENNYKTTPPVLDSDGSFFLVSKLTVDKSRWQQGNVFSCSVMHEALHNHYTQKSLSLSPG

SEQ ID NO: 697 - protein, 453 aa, artificial
  Synthetic polypeptide
ELQLQESGPGLVKPSETLSLTCTVSGGSISDSSYYWGWIRQPPGKGLEWIGSIYYTGETYYAPSLKSRVTISVDTSKNQFSLKLSSVTAADTAVYYCARLRYGVGVPRYFDPWGQGTLVTVSSASTKGPSVFPLAPSSKSTSGGTAALGCLVKDYFPEPVTVSWNSGALTSGVHTFPAVLQSSGLYSLSSVVTVPSSSLGTQTYICNVNHKPSNTKVDKKVEPKSCDKTHTCPPCPAPELLGGPSVFLFPPKPKDTYITRETPEVTCVVVDVSHEDPEVKFNWYVDGVEVHNAKTKPREEQYGSTYRVVSVLTVLHQDWLNGKEYKCKVSNKALPAPIEKTISKAKGQPREPQVYTLPPSRDELTKNQVSLSCAVKGFYPSDIAVEWESNGQPENNYKTTPPVLDSDGSFFLVSKLTVDKSRWQQGNVFSCSVMHEALHNHYTQKSLSLSPGK

SEQ ID NO: 698 - protein, 453 aa, artificial
  Synthetic polypeptide
ELQLQESGPGLVKPSETLSLTCTVSGGSISDSSYYWGWIRQPPGKGLEWIGSIYYTGETYYAPSLKSRVTISVDTSKNQFSLKLSSVTAADTAVYYCARVKYGVGVPRYFDPWGQGTLVTVSSASTKGPSVFPLAPSSKSTSGGTAALGCLVKDYFPEPVTVSWNSGALTSGVHTFPAVLQSSGLYSLSSVVTVPSSSLGTQTYICNVNHKPSNTKVDKKVEPKSCDKTHTCPPCPAPELLGGPSVFLFPPKPKDTLMISRTPEVTCVVVDVSHEDPEVKFNWYVDGVEVHNAKTKPREEQYGSTYRVVSVLTVLHQDWLNGKEYKCKVSNKALPAPIEKTISKAKGQPREPQVYTLPPSRDELTKNQVSLTCLVKGFYPSDIAVEWESNGQPENNYKTTPPVLDSDGSFFLYSKLTVDKSRWQQGNVFSCSVMHEALHNHYTQKSLSLSPGK

SEQ ID NO: 699 - protein, 452 aa, artificial
  Synthetic polypeptide
ELQLQESGPGLVKPSETLSLTCTVSGGSISDSSYYWGWIRQPPGKGLEWIGSIYYTGETYYAPSLKSRVTISVDTSKNQFSLKLSSVTAADTAVYYCARVKYGVGVPRYFDPWGQGTLVTVSSASTKGPSVFPLAPSSKSTSGGTAALGCLVKDYFPEPVTVSWNSGALTSGVHTFPAVLQSSGLYSLSSVVTVPSSSLGTQTYICNVNHKPSNTKVDKKVEPKSCDKTHTCPPCPAPELLGGPSVFLFPPKPKDTYITRETPEVTCVVVDVSHEDPEVKFNWYVDGVEVHNAKTKPREEQYGSTYRVVSVLTVLHQDWLNGKEYKCKVSNKALPAPIEKTISKAKGQPREPQVYTLPPSRDELTKNQVSLTCLVKGFYPSDIAVEWESNGQPENNYKTTPPVLDSDGSFFLYSKLTVDKSRWQQGNVFSCSVMHEALHNHYTQKSLSLSPG

SEQ ID NO: 700 - protein, 453 aa, artificial
  Synthetic polypeptide
ELQLQESGPGLVKPSETLSLTCTVSGGSISDSSYYWGWIRQPPGKGLEWIGSIYYTGETYYAPSLKSRVTISVDTSKNQFSLKLSSVTAADTAVYYCARVKYGVGVPRYFDPWGQGTLVTVSSASTKGPSVFPLAPSSKSTSGGTAALGCLVKDYFPEPVTVSWNSGALTSGVHTFPAVLQSSGLYSLSSVVTVPSSSLGTQTYICNVNHKPSNTKVDKKVEPKSCDKTHTCPPCPAPELLGGPSVFLFPPKPKDTYITRETPEVTCVVVDVSHEDPEVKFNWYVDGVEVHNAKTKPREEQYGSTYRVVSVLTVLHQDWLNGKEYKCKVSNKALPAPIEKTISKAKGQPREPQVYTLPPSRDELTKNQVSLTCLVKGFYPSDIAVEWESNGQPENNYKTTPPVLDSDGSFFLYSKLTVDKSRWQQGNVFSCSVMHEALHNHYTQKSLSLSPGK

SEQ ID NO: 701 - protein, 453 aa, artificial
  Synthetic polypeptide
ELQLQESGPGLVKPSETLSLTCTVSGGSISDSSYYWGWIRQPPGKGLEWIGSIYYTGETYYAPSLKSRVTISVDTSKNQFSLKLSSVTAADTAVYYCARVKYGVGVPRYFDPWGQGTLVTVSSASTKGPSVFPLAPSSKSTSGGTAALGCLVKDYFPEPVTVSWNSGALTSGVHTFPAVLQSSGLYSLSSVVTVPSSSLGTQTYICNVNHKPSNTKVDKKVEPKSCDKTHTCPPCPAPELLGGPSVFLFPPKPKDTLMISRTPEVTCVVVDVSHEDPEVKFNWYVDGVEVHNAKTKPREEQYGSTYRVVSVLTVLHQDWLNGKEYKCKVSNKALPAPIEKTISKAKGQPREPQVYTLPPSRDELTKNQVSLWCLVKGFYPSDIAVEWESNGQPENNYKTTPPVLDSDGSFFLYSKLTVDKSRWQQGNVFSCSVMHEALHNHYTQKSLSLSPGK

SEQ ID NO: 702 - protein, 452 aa, artificial
  Synthetic polypeptide
ELQLQESGPGLVKPSETLSLTCTVSGGSISDSSYYWGWIRQPPGKGLEWIGSIYYTGETYYAPSLKSRVTISVDTSKNQFSLKLSSVTAADTAVYYCARVKYGVGVPRYFDPWGQGTLVTVSSASTKGPSVFPLAPSSKSTSGGTAALGCLVKDYFPEPVTVSWNSGALTSGVHTFPAVLQSSGLYSLSSVVTVPSSSLGTQTYICNVNHKPSNTKVDKKVEPKSCDKTHTCPPCPAPELLGGPSVFLFPPKPKDTYITRETPEVTCVVVDVSHEDPEVKFNWYVDGVEVHNAKTKPREEQYGSTYRVVSVLTVLHQDWLNGKEYKCKVSNKALPAPIEKTISKAKGQPREPQVYTLPPSRDELTKNQVSLWCLVKGFYPSDIAVEWESNGQPENNYKTTPPVLDSDGSFFLYSKLTVDKSRWQQGNVFSCSVMHEALHNHYTQKSLSLSPG

SEQ ID NO: 703 - protein, 453 aa, artificial
  Synthetic polypeptide
ELQLQESGPGLVKPSETLSLTCTVSGGSISDSSYYWGWIRQPPGKGLEWIGSIYYTGETYYAPSLKSRVTISVDTSKNQFSLKLSSVTAADTAVYYCARVKYGVGVPRYFDPWGQGTLVTVSSASTKGPSVFPLAPSSKSTSGGTAALGCLVKDYFPEPVTVSWNSGALTSGVHTFPAVLQSSGLYSLSSVVTVPSSSLGTQTYICNVNHKPSNTKVDKKVEPKSCDKTHTCPPCPAPELLGGPSVFLFPPKPKDTYITRETPEVTCVVVDVSHEDPEVKFNWYVDGVEVHNAKTKPREEQYGSTYRVVSVLTVLHQDWLNGKEYKCKVSNKALPAPIEKTISKAKGQPREPQVYTLPPSRDELTKNQVSLWCLVKGFYPSDIAVEWESNGQPENNYKTTPPVLDSDGSFFLYSKLTVDKSRWQQGNVFSCSVMHEALHNHYTQKSLSLSPGK

SEQ ID NO: 704 - protein, 453 aa, artificial
  Synthetic polypeptide
ELQLQESGPGLVKPSETLSLTCTVSGGSISDSSYYWGWIRQPPGKGLEWIGSIYYTGETYYAPSLKSRVTISVDTSKNQFSLKLSSVTAADTAVYYCARVKYGVGVPRYFDPWGQGTLVTVSSASTKGPSVFPLAPSSKSTSGGTAALGCLVKDYFPEPVTVSWNSGALTSGVHTFPAVLQSSGLYSLSSVVTVPSSSLGTQTYICNVNHKPSNTKVDKKVEPKSCDKTHTCPPCPAPELLGGPSVFLFPPKPKDTLMISRTPEVTCVVVDVSHEDPEVKFNWYVDGVEVHNAKTKPREEQYGSTYRVVSVLTVLHQDWLNGKEYKCKVSNKALPAPIEKTISKAKGQPREPQVYTLPPSRDELTKNQVSLSCAVKGFYPSDIAVEWESNGQPENNYKTTPPVLDSDGSFFLVSKLTVDKSRWQQGNVFSCSVMHEALHNHYTQKSLSLSPGK

SEQ ID NO: 705 - protein, 452 aa, artificial
  Synthetic polypeptide
ELQLQESGPGLVKPSETLSLTCTVSGGSISDSSYYWGWIRQPPGKGLEWIGSIYYTGETYYAPSLKSRVTISVDTSKNQFSLKLSSVTAADTAVYYCARVKYGVGVPRYFDPWGQGTLVTVSSASTKGPSVFPLAPSSKSTSGGTAALGCLVKDYFPEPVTVSWNSGALTSGVHTFPAVLQSSGLYSLSSVVTVPSSSLGTQTYICNVNHKPSNTKVDKKVEPKSCDKTHTCPPCPAPELLGGPSVFLFPPKPKDTYITRETPEVTCVVVDVSHEDPEVKFNWYVDGVEVHNAKTKPREEQYGSTYRVVSVLTVLHQDWLNGKEYKCKVSNKALPAPIEKTISKAKGQPREPQVYTLPPSRDELTKNQVSLSCAVKGFYPSDIAVEWESNGQPENNYKTTPPVLDSDGSFFLVSKLTVDKSRWQQGNVFSCSVMHEALHNHYTQKSLSLSPG

SEQ ID NO: 706 - protein, 453 aa, artificial
  Synthetic polypeptide
ELQLQESGPGLVKPSETLSLTCTVSGGSISDSSYYWGWIRQPPGKGLEWIGSIYYTGETYYAPSLKSRVTISVDTSKNQFSLKLSSVTAADTAVYYCARVKYGVGVPRYFDPWGQGTLVTVSSASTKGPSVFPLAPSSKSTSGGTAALGCLVKDYFPEPVTVSWNSGALTSGVHTFPAVLQSSGLYSLSSVVTVPSSSLGTQTYICNVNHKPSNTKVDKKVEPKSCDKTHTCPPCPAPELLGGPSVFLFPPKPKDTYITRETPEVTCVVVDVSHEDPEVKFNWYVDGVEVHNAKTKPREEQYGSTYRVVSVLTVLHQDWLNGKEYKCKVSNKALPAPIEKTISKAKGQPREPQVYTLPPSRDELTKNQVSLSCAVKGFYPSDIAVEWESNGQPENNYKTTPPVLDSDGSFFLVSKLTVDKSRWQQGNVFSCSVMHEALHNHYTQKSLSLSPGK

SEQ ID NO: 707 - protein, 453 aa, artificial
  Synthetic polypeptide
ELQLQESGPGLVKPSETLSLTCTVSGGSISDSSYYWGWIRQPPGKGLEWIGSIYYTGETYYAPSLKSRVTISVDTSKNQFSLKLSSVTAADTAVYYCARVRYGVGVPRHFDPWGQGTLVTVSSASTKGPSVFPLAPSSKSTSGGTAALGCLVKDYFPEPVTVSWNSGALTSGVHTFPAVLQSSGLYSLSSVVTVPSSSLGTQTYICNVNHKPSNTKVDKKVEPKSCDKTHTCPPCPAPELLGGPSVFLFPPKPKDTLMISRTPEVTCVVVDVSHEDPEVKFNWYVDGVEVHNAKTKPREEQYGSTYRVVSVLTVLHQDWLNGKEYKCKVSNKALPAPIEKTISKAKGQPREPQVYTLPPSRDELTKNQVSLTCLVKGFYPSDIAVEWESNGQPENNYKTTPPVLDSDGSFFLYSKLTVDKSRWQQGNVFSCSVMHEALHNHYTQKSLSLSPGK

SEQ ID NO: 708 - protein, 452 aa, artificial
  Synthetic polypeptide
ELQLQESGPGLVKPSETLSLTCTVSGGSISDSSYYWGWIRQPPGKGLEWIGSIYYTGETYYAPSLKSRVTISVDTSKNQFSLKLSSVTAADTAVYYCARVRYGVGVPRHFDPWGQGTLVTVSSASTKGPSVFPLAPSSKSTSGGTAALGCLVKDYFPEPVTVSWNSGALTSGVHTFPAVLQSSGLYSLSSVVTVPSSSLGTQTYICNVNHKPSNTKVDKKVEPKSCDKTHTCPPCPAPELLGGPSVFLFPPKPKDTYITRETPEVTCVVVDVSHEDPEVKFNWYVDGVEVHNAKTKPREEQYGSTYRVVSVLTVLHQDWLNGKEYKCKVSNKALPAPIEKTISKAKGQPREPQVYTLPPSRDELTKNQVSLTCLVKGFYPSDIAVEWESNGQPENNYKTTPPVLDSDGSFFLYSKLTVDKSRWQQGNVFSCSVMHEALHNHYTQKSLSLSPG

SEQ ID NO: 709 - protein, 453 aa, artificial
  Synthetic polypeptide
ELQLQESGPGLVKPSETLSLTCTVSGGSISDSSYYWGWIRQPPGKGLEWIGSIYYTGETYYAPSLKSRVTISVDTSKNQFSLKLSSVTAADTAVYYCARVRYGVGVPRHFDPWGQGTLVTVSSASTKGPSVFPLAPSSKSTSGGTAALGCLVKDYFPEPVTVSWNSGALTSGVHTFPAVLQSSGLYSLSSVVTVPSSSLGTQTYICNVNHKPSNTKVDKKVEPKSCDKTHTCPPCPAPELLGGPSVFLFPPKPKDTYITRETPEVTCVVVDVSHEDPEVKFNWYVDGVEVHNAKTKPREEQYGSTYRVVSVLTVLHQDWLNGKEYKCKVSNKALPAPIEKTISKAKGQPREPQVYTLPPSRDELTKNQVSLTCLVKGFYPSDIAVEWESNGQPENNYKTTPPVLDSDGSFFLYSKLTVDKSRWQQGNVFSCSVMHEALHNHYTQKSLSLSPGK

SEQ ID NO: 710 - protein, 453 aa, artificial
  Synthetic polypeptide
ELQLQESGPGLVKPSETLSLTCTVSGGSISDSSYYWGWIRQPPGKGLEWIGSIYYTGETYYAPSLKSRVTISVDTSKNQFSLKLSSVTAADTAVYYCARVRYGVGVPRHFDPWGQGTLVTVSSASTKGPSVFPLAPSSKSTSGGTAALGCLVKDYFPEPVTVSWNSGALTSGVHTFPAVLQSSGLYSLSSVVTVPSSSLGTQTYICNVNHKPSNTKVDKKVEPKSCDKTHTCPPCPAPELLGGPSVFLFPPKPKDTLMISRTPEVTCVVVDVSHEDPEVKFNWYVDGVEVHNAKTKPREEQYGSTYRVVSVLTVLHQDWLNGKEYKCKVSNKALPAPIEKTISKAKGQPREPQVYTLPPSRDELTKNQVSLWCLVKGFYPSDIAVEWESNGQPENNYKTTPPVLDSDGSFFLYSKLTVDKSRWQQGNVFSCSVMHEALHNHYTQKSLSLSPGK

SEQ ID NO: 711 - protein, 452 aa, artificial
  Synthetic polypeptide
ELQLQESGPGLVKPSETLSLTCTVSGGSISDSSYYWGWIRQPPGKGLEWIGSIYYTGETYYAPSLKSRVTISVDTSKNQFSLKLSSVTAADTAVYYCARVRYGVGVPRHFDPWGQGTLVTVSSASTKGPSVFPLAPSSKSTSGGTAALGCLVKDYFPEPVTVSWNSGALTSGVHTFPAVLQSSGLYSLSSVVTVPSSSLGTQTYICNVNHKPSNTKVDKKVEPKSCDKTHTCPPCPAPELLGGPSVFLFPPKPKDTYITRETPEVTCVVVDVSHEDPEVKFNWYVDGVEVHNAKTKPREEQYGSTYRVVSVLTVLHQDWLNGKEYKCKVSNKALPAPIEKTISKAKGQPREPQVYTLPPSRDELTKNQVSLWCLVKGFYPSDIAVEWESNGQPENNYKTTPPVLDSDGSFFLYSKLTVDKSRWQQGNVFSCSVMHEALHNHYTQKSLSLSPG

SEQ ID NO: 712 - protein, 453 aa, artificial
  Synthetic polypeptide
ELQLQESGPGLVKPSETLSLTCTVSGGSISDSSYYWGWIRQPPGKGLEWIGSIYYTGETYYAPSLKSRVTISVDTSKNQFSLKLSSVTAADTAVYYCARVRYGVGVPRHFDPWGQGTLVTVSSASTKGPSVFPLAPSSKSTSGGTAALGCLVKDYFPEPVTVSWNSGALTSGVHTFPAVLQSSGLYSLSSVVTVPSSSLGTQTYICNVNHKPSNTKVDKKVEPKSCDKTHTCPPCPAPELLGGPSVFLFPPKPKDTYITRETPEVTCVVVDVSHEDPEVKFNWYVDGVEVHNAKTKPREEQYGSTYRVVSVLTVLHQDWLNGKEYKCKVSNKALPAPIEKTISKAKGQPREPQVYTLPPSRDELTKNQVSLWCLVKGFYPSDIAVEWESNGQPENNYKTTPPVLDSDGSFFLYSKLTVDKSRWQQGNVFSCSVMHEALHNHYTQKSLSLSPGK

SEQ ID NO: 713 - protein, 453 aa, artificial
  Synthetic polypeptide
ELQLQESGPGLVKPSETLSLTCTVSGGSISDSSYYWGWIRQPPGKGLEWIGSIYYTGETYYAPSLKSRVTISVDTSKNQFSLKLSSVTAADTAVYYCARVRYGVGVPRHFDPWGQGTLVTVSSASTKGPSVFPLAPSSKSTSGGTAALGCLVKDYFPEPVTVSWNSGALTSGVHTFPAVLQSSGLYSLSSVVTVPSSSLGTQTYICNVNHKPSNTKVDKKVEPKSCDKTHTCPPCPAPELLGGPSVFLFPPKPKDTLMISRTPEVTCVVVDVSHEDPEVKFNWYVDGVEVHNAKTKPREEQYGSTYRVVSVLTVLHQDWLNGKEYKCKVSNKALPAPIEKTISKAKGQPREPQVYTLPPSRDELTKNQVSLSCAVKGFYPSDIAVEWESNGQPENNYKTTPPVLDSDGSFFLVSKLTVDKSRWQQGNVFSCSVMHEALHNHYTQKSLSLSPGK

SEQ ID NO: 714 - protein, 452 aa, artificial
  Synthetic polypeptide
ELQLQESGPGLVKPSETLSLTCTVSGGSISDSSYYWGWIRQPPGKGLEWIGSIYYTGETYYAPSLKSRVTISVDTSKNQFSLKLSSVTAADTAVYYCARVRYGVGVPRHFDPWGQGTLVTVSSASTKGPSVFPLAPSSKSTSGGTAALGCLVKDYFPEPVTVSWNSGALTSGVHTFPAVLQSSGLYSLSSVVTVPSSSLGTQTYICNVNHKPSNTKVDKKVEPKSCDKTHTCPPCPAPELLGGPSVFLFPPKPKDTYITRETPEVTCVVVDVSHEDPEVKFNWYVDGVEVHNAKTKPREEQYGSTYRVVSVLTVLHQDWLNGKEYKCKVSNKALPAPIEKTISKAKGQPREPQVYTLPPSRDELTKNQVSLSCAVKGFYPSDIAVEWESNGQPENNYKTTPPVLDSDGSFFLVSKLTVDKSRWQQGNVFSCSVMHEALHNHYTQKSLSLSPG

SEQ ID NO: 715 - protein, 453 aa, artificial
  Synthetic polypeptide
ELQLQESGPGLVKPSETLSLTCTVSGGSISDSSYYWGWIRQPPGKGLEWIGSIYYTGETYYAPSLKSRVTISVDTSKNQFSLKLSSVTAADTAVYYCARVRYGVGVPRHFDPWGQGTLVTVSSASTKGPSVFPLAPSSKSTSGGTAALGCLVKDYFPEPVTVSWNSGALTSGVHTFPAVLQSSGLYSLSSVVTVPSSSLGTQTYICNVNHKPSNTKVDKKVEPKSCDKTHTCPPCPAPELLGGPSVFLFPPKPKDTYITRETPEVTCVVVDVSHEDPEVKFNWYVDGVEVHNAKTKPREEQYGSTYRVVSVLTVLHQDWLNGKEYKCKVSNKALPAPIEKTISKAKGQPREPQVYTLPPSRDELTKNQVSLSCAVKGFYPSDIAVEWESNGQPENNYKTTPPVLDSDGSFFLVSKLTVDKSRWQQGNVFSCSVMHEALHNHYTQKSLSLSPGK

SEQ ID NO: 716 - protein, 453 aa, artificial
  Synthetic polypeptide
ELQLQESGPGLVKPSETLSLTCTVSGGSISESSYYWGWIRQPPGKGLEWIGSIYYTGETYYAPSLKSRVTISVDTSKNQFSLKLSSVTAADTAVYYCARLRYGVGVPRYFDPWGQGTLVTVSSASTKGPSVFPLAPSSKSTSGGTAALGCLVKDYFPEPVTVSWNSGALTSGVHTFPAVLQSSGLYSLSSVVTVPSSSLGTQTYICNVNHKPSNTKVDKKVEPKSCDKTHTCPPCPAPELLGGPSVFLFPPKPKDTLMISRTPEVTCVVVDVSHEDPEVKFNWYVDGVEVHNAKTKPREEQYGSTYRVVSVLTVLHQDWLNGKEYKCKVSNKALPAPIEKTISKAKGQPREPQVYTLPPSRDELTKNQVSLTCLVKGFYPSDIAVEWESNGQPENNYKTTPPVLDSDGSFFLYSKLTVDKSRWQQGNVFSCSVMHEALHNHYTQKSLSLSPGK

SEQ ID NO: 717 - protein, 452 aa, artificial
  Synthetic polypeptide
ELQLQESGPGLVKPSETLSLTCTVSGGSISESSYYWGWIRQPPGKGLEWIGSIYYTGETYYAPSLKSRVTISVDTSKNQFSLKLSSVTAADTAVYYCARLRYGVGVPRYFDPWGQGTLVTVSSASTKGPSVFPLAPSSKSTSGGTAALGCLVKDYFPEPVTVSWNSGALTSGVHTFPAVLQSSGLYSLSSVVTVPSSSLGTQTYICNVNHKPSNTKVDKKVEPKSCDKTHTCPPCPAPELLGGPSVFLFPPKPKDTYITRETPEVTCVVVDVSHEDPEVKFNWYVDGVEVHNAKTKPREEQYGSTYRVVSVLTVLHQDWLNGKEYKCKVSNKALPAPIEKTISKAKGQPREPQVYTLPPSRDELTKNQVSLTCLVKGFYPSDIAVEWESNGQPENNYKTTPPVLDSDGSFFLYSKLTVDKSRWQQGNVFSCSVMHEALHNHYTQKSLSLSPG

SEQ ID NO: 718 - protein, 453 aa, artificial
  Synthetic polypeptide
ELQLQESGPGLVKPSETLSLTCTVSGGSISESSYYWGWIRQPPGKGLEWIGSIYYTGETYYAPSLKSRVTISVDTSKNQFSLKLSSVTAADTAVYYCARLRYGVGVPRYFDPWGQGTLVTVSSASTKGPSVFPLAPSSKSTSGGTAALGCLVKDYFPEPVTVSWNSGALTSGVHTFPAVLQSSGLYSLSSVVTVPSSSLGTQTYICNVNHKPSNTKVDKKVEPKSCDKTHTCPPCPAPELLGGPSVFLFPPKPKDTYITRETPEVTCVVVDVSHEDPEVKFNWYVDGVEVHNAKTKPREEQYGSTYRVVSVLTVLHQDWLNGKEYKCKVSNKALPAPIEKTISKAKGQPREPQVYTLPPSRDELTKNQVSLTCLVKGFYPSDIAVEWESNGQPENNYKTTPPVLDSDGSFFLYSKLTVDKSRWQQGNVFSCSVMHEALHNHYTQKSLSLSPGK

SEQ ID NO: 719 - protein, 453 aa, artificial
  Synthetic polypeptide
ELQLQESGPGLVKPSETLSLTCTVSGGSISESSYYWGWIRQPPGKGLEWIGSIYYTGETYYAPSLKSRVTISVDTSKNQFSLKLSSVTAADTAVYYCARLRYGVGVPRYFDPWGQGTLVTVSSASTKGPSVFPLAPSSKSTSGGTAALGCLVKDYFPEPVTVSWNSGALTSGVHTFPAVLQSSGLYSLSSVVTVPSSSLGTQTYICNVNHKPSNTKVDKKVEPKSCDKTHTCPPCPAPELLGGPSVFLFPPKPKDTLMISRTPEVTCVVVDVSHEDPEVKFNWYVDGVEVHNAKTKPREEQYGSTYRVVSVLTVLHQDWLNGKEYKCKVSNKALPAPIEKTISKAKGQPREPQVYTLPPSRDELTKNQVSLWCLVKGFYPSDIAVEWESNGQPENNYKTTPPVLDSDGSFFLYSKLTVDKSRWQQGNVFSCSVMHEALHNHYTQKSLSLSPGK

SEQ ID NO: 720 - protein, 452 aa, artificial
  Synthetic polypeptide
ELQLQESGPGLVKPSETLSLTCTVSGGSISESSYYWGWIRQPPGKGLEWIGSIYYTGETYYAPSLKSRVTISVDTSKNQFSLKLSSVTAADTAVYYCARLRYGVGVPRYFDPWGQGTLVTVSSASTKGPSVFPLAPSSKSTSGGTAALGCLVKDYFPEPVTVSWNSGALTSGVHTFPAVLQSSGLYSLSSVVTVPSSSLGTQTYICNVNHKPSNTKVDKKVEPKSCDKTHTCPPCPAPELLGGPSVFLFPPKPKDTYITRETPEVTCVVVDVSHEDPEVKFNWYVDGVEVHNAKTKPREEQYGSTYRVVSVLTVLHQDWLNGKEYKCKVSNKALPAPIEKTISKAKGQPREPQVYTLPPSRDELTKNQVSLWCLVKGFYPSDIAVEWESNGQPENNYKTTPPVLDSDGSFFLYSKLTVDKSRWQQGNVFSCSVMHEALHNHYTQKSLSLSPG

SEQ ID NO: 721 - protein, 453 aa, artificial
  Synthetic polypeptide
ELQLQESGPGLVKPSETLSLTCTVSGGSISESSYYWGWIRQPPGKGLEWIGSIYYTGETYYAPSLKSRVTISVDTSKNQFSLKLSSVTAADTAVYYCARLRYGVGVPRYFDPWGQGTLVTVSSASTKGPSVFPLAPSSKSTSGGTAALGCLVKDYFPEPVTVSWNSGALTSGVHTFPAVLQSSGLYSLSSVVTVPSSSLGTQTYICNVNHKPSNTKVDKKVEPKSCDKTHTCPPCPAPELLGGPSVFLFPPKPKDTYITRETPEVTCVVVDVSHEDPEVKFNWYVDGVEVHNAKTKPREEQYGSTYRVVSVLTVLHQDWLNGKEYKCKVSNKALPAPIEKTISKAKGQPREPQVYTLPPSRDELTKNQVSLWCLVKGFYPSDIAVEWESNGQPENNYKTTPPVLDSDGSFFLYSKLTVDKSRWQQGNVFSCSVMHEALHNHYTQKSLSLSPGK

SEQ ID NO: 722 - protein, 453 aa, artificial
  Synthetic polypeptide
ELQLQESGPGLVKPSETLSLTCTVSGGSISESSYYWGWIRQPPGKGLEWIGSIYYTGETYYAPSLKSRVTISVDTSKNQFSLKLSSVTAADTAVYYCARLRYGVGVPRYFDPWGQGTLVTVSSASTKGPSVFPLAPSSKSTSGGTAALGCLVKDYFPEPVTVSWNSGALTSGVHTFPAVLQSSGLYSLSSVVTVPSSSLGTQTYICNVNHKPSNTKVDKKVEPKSCDKTHTCPPCPAPELLGGPSVFLFPPKPKDTLMISRTPEVTCVVVDVSHEDPEVKFNWYVDGVEVHNAKTKPREEQYGSTYRVVSVLTVLHQDWLNGKEYKCKVSNKALPAPIEKTISKAKGQPREPQVYTLPPSRDELTKNQVSLSCAVKGFYPSDIAVEWESNGQPENNYKTTPPVLDSDGSFFLVSKLTVDKSRWQQGNVFSCSVMHEALHNHYTQKSLSLSPGK

SEQ ID NO: 723 - protein, 452 aa, artificial
  Synthetic polypeptide
ELQLQESGPGLVKPSETLSLTCTVSGGSISESSYYWGWIRQPPGKGLEWIGSIYYTGETYYAPSLKSRVTISVDTSKNQFSLKLSSVTAADTAVYYCARLRYGVGVPRYFDPWGQGTLVTVSSASTKGPSVFPLAPSSKSTSGGTAALGCLVKDYFPEPVTVSWNSGALTSGVHTFPAVLQSSGLYSLSSVVTVPSSSLGTQTYICNVNHKPSNTKVDKKVEPKSCDKTHTCPPCPAPELLGGPSVFLFPPKPKDTYITRETPEVTCVVVDVSHEDPEVKFNWYVDGVEVHNAKTKPREEQYGSTYRVVSVLTVLHQDWLNGKEYKCKVSNKALPAPIEKTISKAKGQPREPQVYTLPPSRDELTKNQVSLSCAVKGFYPSDIAVEWESNGQPENNYKTTPPVLDSDGSFFLVSKLTVDKSRWQQGNVFSCSVMHEALHNHYTQKSLSLSPG

SEQ ID NO: 724 - protein, 453 aa, artificial
  Synthetic polypeptide
ELQLQESGPGLVKPSETLSLTCTVSGGSISESSYYWGWIRQPPGKGLEWIGSIYYTGETYYAPSLKSRVTISVDTSKNQFSLKLSSVTAADTAVYYCARLRYGVGVPRYFDPWGQGTLVTVSSASTKGPSVFPLAPSSKSTSGGTAALGCLVKDYFPEPVTVSWNSGALTSGVHTFPAVLQSSGLYSLSSVVTVPSSSLGTQTYICNVNHKPSNTKVDKKVEPKSCDKTHTCPPCPAPELLGGPSVFLFPPKPKDTYITRETPEVTCVVVDVSHEDPEVKFNWYVDGVEVHNAKTKPREEQYGSTYRVVSVLTVLHQDWLNGKEYKCKVSNKALPAPIEKTISKAKGQPREPQVYTLPPSRDELTKNQVSLSCAVKGFYPSDIAVEWESNGQPENNYKTTPPVLDSDGSFFLVSKLTVDKSRWQQGNVFSCSVMHEALHNHYTQKSLSLSPGK

SEQ ID NO: 725 - protein, 453 aa, artificial
  Synthetic polypeptide
ELQLQESGPGLVKPSETLSLTCTVSGGSISESSYYWGWIRQPPGKGLEWIGSIYYTGETYYAPSLKSRVTISVDTSKNQFSLKLSSVTAADTAVYYCARVKYGVGVPRYFDPWGQGTLVTVSSASTKGPSVFPLAPSSKSTSGGTAALGCLVKDYFPEPVTVSWNSGALTSGVHTFPAVLQSSGLYSLSSVVTVPSSSLGTQTYICNVNHKPSNTKVDKKVEPKSCDKTHTCPPCPAPELLGGPSVFLFPPKPKDTLMISRTPEVTCVVVDVSHEDPEVKFNWYVDGVEVHNAKTKPREEQYGSTYRVVSVLTVLHQDWLNGKEYKCKVSNKALPAPIEKTISKAKGQPREPQVYTLPPSRDELTKNQVSLTCLVKGFYPSDIAVEWESNGQPENNYKTTPPVLDSDGSFFLYSKLTVDKSRWQQGNVFSCSVMHEALHNHYTQKSLSLSPGK

SEQ ID NO: 726 - protein, 452 aa, artificial
  Synthetic polypeptide
ELQLQESGPGLVKPSETLSLTCTVSGGSISESSYYWGWIRQPPGKGLEWIGSIYYTGETYYAPSLKSRVTISVDTSKNQFSLKLSSVTAADTAVYYCARVKYGVGVPRYFDPWGQGTLVTVSSASTKGPSVFPLAPSSKSTSGGTAALGCLVKDYFPEPVTVSWNSGALTSGVHTFPAVLQSSGLYSLSSVVTVPSSSLGTQTYICNVNHKPSNTKVDKKVEPKSCDKTHTCPPCPAPELLGGPSVFLFPPKPKDTYITRETPEVTCVVVDVSHEDPEVKFNWYVDGVEVHNAKTKPREEQYGSTYRVVSVLTVLHQDWLNGKEYKCKVSNKALPAPIEKTISKAKGQPREPQVYTLPPSRDELTKNQVSLTCLVKGFYPSDIAVEWESNGQPENNYKTTPPVLDSDGSFFLYSKLTVDKSRWQQGNVFSCSVMHEALHNHYTQKSLSLSPG

SEQ ID NO: 727 - protein, 453 aa, artificial
  Synthetic polypeptide
ELQLQESGPGLVKPSETLSLTCTVSGGSISESSYYWGWIRQPPGKGLEWIGSIYYTGETYYAPSLKSRVTISVDTSKNQFSLKLSSVTAADTAVYYCARVKYGVGVPRYFDPWGQGTLVTVSSASTKGPSVFPLAPSSKSTSGGTAALGCLVKDYFPEPVTVSWNSGALTSGVHTFPAVLQSSGLYSLSSVVTVPSSSLGTQTYICNVNHKPSNTKVDKKVEPKSCDKTHTCPPCPAPELLGGPSVFLFPPKPKDTYITRETPEVTCVVVDVSHEDPEVKFNWYVDGVEVHNAKTKPREEQYGSTYRVVSVLTVLHQDWLNGKEYKCKVSNKALPAPIEKTISKAKGQPREPQVYTLPPSRDELTKNQVSLTCLVKGFYPSDIAVEWESNGQPENNYKTTPPVLDSDGSFFLYSKLTVDKSRWQQGNVFSCSVMHEALHNHYTQKSLSLSPGK

SEQ ID NO: 728 - protein, 453 aa, artificial
  Synthetic polypeptide
ELQLQESGPGLVKPSETLSLTCTVSGGSISESSYYWGWIRQPPGKGLEWIGSIYYTGETYYAPSLKSRVTISVDTSKNQFSLKLSSVTAADTAVYYCARVKYGVGVPRYFDPWGQGTLVTVSSASTKGPSVFPLAPSSKSTSGGTAALGCLVKDYFPEPVTVSWNSGALTSGVHTFPAVLQSSGLYSLSSVVTVPSSSLGTQTYICNVNHKPSNTKVDKKVEPKSCDKTHTCPPCPAPELLGGPSVFLFPPKPKDTLMISRTPEVTCVVVDVSHEDPEVKFNWYVDGVEVHNAKTKPREEQYGSTYRVVSVLTVLHQDWLNGKEYKCKVSNKALPAPIEKTISKAKGQPREPQVYTLPPSRDELTKNQVSLWCLVKGFYPSDIAVEWESNGQPENNYKTTPPVLDSDGSFFLYSKLTVDKSRWQQGNVFSCSVMHEALHNHYTQKSLSLSPGK

SEQ ID NO: 729 - protein, 452 aa, artificial
  Synthetic polypeptide
ELQLQESGPGLVKPSETLSLTCTVSGGSISESSYYWGWIRQPPGKGLEWIGSIYYTGETYYAPSLKSRVTISVDTSKNQFSLKLSSVTAADTAVYYCARVKYGVGVPRYFDPWGQGTLVTVSSASTKGPSVFPLAPSSKSTSGGTAALGCLVKDYFPEPVTVSWNSGALTSGVHTFPAVLQSSGLYSLSSVVTVPSSSLGTQTYICNVNHKPSNTKVDKKVEPKSCDKTHTCPPCPAPELLGGPSVFLFPPKPKDTYITRETPEVTCVVVDVSHEDPEVKFNWYVDGVEVHNAKTKPREEQYGSTYRVVSVLTVLHQDWLNGKEYKCKVSNKALPAPIEKTISKAKGQPREPQVYTLPPSRDELTKNQVSLWCLVKGFYPSDIAVEWESNGQPENNYKTTPPVLDSDGSFFLYSKLTVDKSRWQQGNVFSCSVMHEALHNHYTQKSLSLSPG

SEQ ID NO: 730 - protein, 453 aa, artificial
  Synthetic polypeptide
ELQLQESGPGLVKPSETLSLTCTVSGGSISESSYYWGWIRQPPGKGLEWIGSIYYTGETYYAPSLKSRVTISVDTSKNQFSLKLSSVTAADTAVYYCARVKYGVGVPRYFDPWGQGTLVTVSSASTKGPSVFPLAPSSKSTSGGTAALGCLVKDYFPEPVTVSWNSGALTSGVHTFPAVLQSSGLYSLSSVVTVPSSSLGTQTYICNVNHKPSNTKVDKKVEPKSCDKTHTCPPCPAPELLGGPSVFLFPPKPKDTYITRETPEVTCVVVDVSHEDPEVKFNWYVDGVEVHNAKTKPREEQYGSTYRVVSVLTVLHQDWLNGKEYKCKVSNKALPAPIEKTISKAKGQPREPQVYTLPPSRDELTKNQVSLWCLVKGFYPSDIAVEWESNGQPENNYKTTPPVLDSDGSFFLYSKLTVDKSRWQQGNVFSCSVMHEALHNHYTQKSLSLSPGK

SEQ ID NO: 731 - protein, 453 aa, artificial
  Synthetic polypeptide
ELQLQESGPGLVKPSETLSLTCTVSGGSISESSYYWGWIRQPPGKGLEWIGSIYYTGETYYAPSLKSRVTISVDTSKNQFSLKLSSVTAADTAVYYCARVKYGVGVPRYFDPWGQGTLVTVSSASTKGPSVFPLAPSSKSTSGGTAALGCLVKDYFPEPVTVSWNSGALTSGVHTFPAVLQSSGLYSLSSVVTVPSSSLGTQTYICNVNHKPSNTKVDKKVEPKSCDKTHTCPPCPAPELLGGPSVFLFPPKPKDTLMISRTPEVTCVVVDVSHEDPEVKFNWYVDGVEVHNAKTKPREEQYGSTYRVVSVLTVLHQDWLNGKEYKCKVSNKALPAPIEKTISKAKGQPREPQVYTLPPSRDELTKNQVSLSCAVKGFYPSDIAVEWESNGQPENNYKTTPPVLDSDGSFFLVSKLTVDKSRWQQGNVFSCSVMHEALHNHYTQKSLSLSPGK

SEQ ID NO: 732 - protein, 452 aa, artificial
  Synthetic polypeptide
ELQLQESGPGLVKPSETLSLTCTVSGGSISESSYYWGWIRQPPGKGLEWIGSIYYTGETYYAPSLKSRVTISVDTSKNQFSLKLSSVTAADTAVYYCARVKYGVGVPRYFDPWGQGTLVTVSSASTKGPSVFPLAPSSKSTSGGTAALGCLVKDYFPEPVTVSWNSGALTSGVHTFPAVLQSSGLYSLSSVVTVPSSSLGTQTYICNVNHKPSNTKVDKKVEPKSCDKTHTCPPCPAPELLGGPSVFLFPPKPKDTYITRETPEVTCVVVDVSHEDPEVKFNWYVDGVEVHNAKTKPREEQYGSTYRVVSVLTVLHQDWLNGKEYKCKVSNKALPAPIEKTISKAKGQPREPQVYTLPPSRDELTKNQVSLSCAVKGFYPSDIAVEWESNGQPENNYKTTPPVLDSDGSFFLVSKLTVDKSRWQQGNVFSCSVMHEALHNHYTQKSLSLSPG

SEQ ID NO: 733 - protein, 453 aa, artificial
  Synthetic polypeptide
ELQLQESGPGLVKPSETLSLTCTVSGGSISESSYYWGWIRQPPGKGLEWIGSIYYTGETYYAPSLKSRVTISVDTSKNQFSLKLSSVTAADTAVYYCARVKYGVGVPRYFDPWGQGTLVTVSSASTKGPSVFPLAPSSKSTSGGTAALGCLVKDYFPEPVTVSWNSGALTSGVHTFPAVLQSSGLYSLSSVVTVPSSSLGTQTYICNVNHKPSNTKVDKKVEPKSCDKTHTCPPCPAPELLGGPSVFLFPPKPKDTYITRETPEVTCVVVDVSHEDPEVKFNWYVDGVEVHNAKTKPREEQYGSTYRVVSVLTVLHQDWLNGKEYKCKVSNKALPAPIEKTISKAKGQPREPQVYTLPPSRDELTKNQVSLSCAVKGFYPSDIAVEWESNGQPENNYKTTPPVLDSDGSFFLVSKLTVDKSRWQQGNVFSCSVMHEALHNHYTQKSLSLSPGK

SEQ ID NO: 734 - protein, 453 aa, artificial
  Synthetic polypeptide
QLQLQESGPGLVKPSETLSLTCTVSGGSISTSSYYWGWIRQPPGKGLEWIGSIYYTGNTYYNPSLKSRVTISVDTSKNQFSLKLSSVTAADTAVYYCARVRYGVGVPRYFDPWGQGTLVTVSSASTKGPSVFPLAPSSKSTSGGTAALGCLVKDYFPEPVTVSWNSGALTSGVHTFPAVLQSSGLYSLSSVVTVPSSSLGTQTYICNVNHKPSNTKVDKKVEPKSCDKTHTCPPCPAPELLGGPSVFLFPPKPKDTLMISRTPEVTCVVVDVSHEDPEVKFNWYVDGVEVHNAKTKPREEQYGSTYRVVSVLTVLHQDWLNGKEYKCKVSNKALPAPIEKTISKAKGQPREPQVYTLPPSRDELTKNQVSLTCLVKGFYPSDIAVEWESNGQPENNYKTTPPVLDSDGSFFLYSKLTVDKSRWQQGNVFSCSVMHEALHNHYTQKSLSLSPGK

SEQ ID NO: 735 - protein, 452 aa, artificial
  Synthetic polypeptide
QLQLQESGPGLVKPSETLSLTCTVSGGSISTSSYYWGWIRQPPGKGLEWIGSIYYTGNTYYNPSLKSRVTISVDTSKNQFSLKLSSVTAADTAVYYCARVRYGVGVPRYFDPWGQGTLVTVSSASTKGPSVFPLAPSSKSTSGGTAALGCLVKDYFPEPVTVSWNSGALTSGVHTFPAVLQSSGLYSLSSVVTVPSSSLGTQTYICNVNHKPSNTKVDKKVEPKSCDKTHTCPPCPAPELLGGPSVFLFPPKPKDTYITRETPEVTCVVVDVSHEDPEVKFNWYVDGVEVHNAKTKPREEQYGSTYRVVSVLTVLHQDWLNGKEYKCKVSNKALPAPIEKTISKAKGQPREPQVYTLPPSRDELTKNQVSLTCLVKGFYPSDIAVEWESNGQPENNYKTTPPVLDSDGSFFLYSKLTVDKSRWQQGNVFSCSVMHEALHNHYTQKSLSLSPG

SEQ ID NO: 736 - protein, 453 aa, artificial
  Synthetic polypeptide
QLQLQESGPGLVKPSETLSLTCTVSGGSISTSSYYWGWIRQPPGKGLEWIGSIYYTGNTYYNPSLKSRVTISVDTSKNQFSLKLSSVTAADTAVYYCARVRYGVGVPRYFDPWGQGTLVTVSSASTKGPSVFPLAPSSKSTSGGTAALGCLVKDYFPEPVTVSWNSGALTSGVHTFPAVLQSSGLYSLSSVVTVPSSSLGTQTYICNVNHKPSNTKVDKKVEPKSCDKTHTCPPCPAPELLGGPSVFLFPPKPKDTYITRETPEVTCVVVDVSHEDPEVKFNWYVDGVEVHNAKTKPREEQYGSTYRVVSVLTVLHQDWLNGKEYKCKVSNKALPAPIEKTISKAKGQPREPQVYTLPPSRDELTKNQVSLTCLVKGFYPSDIAVEWESNGQPENNYKTTPPVLDSDGSFFLYSKLTVDKSRWQQGNVFSCSVMHEALHNHYTQKSLSLSPGK

SEQ ID NO: 737 - protein, 453 aa, artificial
  Synthetic polypeptide
QLQLQESGPGLVKPSETLSLTCTVSGGSISTSSYYWGWIRQPPGKGLEWIGSIYYTGNTYYNPSLKSRVTISVDTSKNQFSLKLSSVTAADTAVYYCARVRYGVGVPRYFDPWGQGTLVTVSSASTKGPSVFPLAPSSKSTSGGTAALGCLVKDYFPEPVTVSWNSGALTSGVHTFPAVLQSSGLYSLSSVVTVPSSSLGTQTYICNVNHKPSNTKVDKKVEPKSCDKTHTCPPCPAPELLGGPSVFLFPPKPKDTLMISRTPEVTCVVVDVSHEDPEVKFNWYVDGVEVHNAKTKPREEQYGSTYRVVSVLTVLHQDWLNGKEYKCKVSNKALPAPIEKTISKAKGQPREPQVYTLPPSRDELTKNQVSLWCLVKGFYPSDIAVEWESNGQPENNYKTTPPVLDSDGSFFLYSKLTVDKSRWQQGNVFSCSVMHEALHNHYTQKSLSLSPGK

SEQ ID NO: 738 - protein, 452 aa, artificial
  Synthetic polypeptide
QLQLQESGPGLVKPSETLSLTCTVSGGSISTSSYYWGWIRQPPGKGLEWIGSIYYTGNTYYNPSLKSRVTISVDTSKNQFSLKLSSVTAADTAVYYCARVRYGVGVPRYFDPWGQGTLVTVSSASTKGPSVFPLAPSSKSTSGGTAALGCLVKDYFPEPVTVSWNSGALTSGVHTFPAVLQSSGLYSLSSVVTVPSSSLGTQTYICNVNHKPSNTKVDKKVEPKSCDKTHTCPPCPAPELLGGPSVFLFPPKPKDTYITRETPEVTCVVVDVSHEDPEVKFNWYVDGVEVHNAKTKPREEQYGSTYRVVSVLTVLHQDWLNGKEYKCKVSNKALPAPIEKTISKAKGQPREPQVYTLPPSRDELTKNQVSLWCLVKGFYPSDIAVEWESNGQPENNYKTTPPVLDSDGSFFLYSKLTVDKSRWQQGNVFSCSVMHEALHNHYTQKSLSLSPG

SEQ ID NO: 739 - protein, 453 aa, artificial
  Synthetic polypeptide
QLQLQESGPGLVKPSETLSLTCTVSGGSISTSSYYWGWIRQPPGKGLEWIGSIYYTGNTYYNPSLKSRVTISVDTSKNQFSLKLSSVTAADTAVYYCARVRYGVGVPRYFDPWGQGTLVTVSSASTKGPSVFPLAPSSKSTSGGTAALGCLVKDYFPEPVTVSWNSGALTSGVHTFPAVLQSSGLYSLSSVVTVPSSSLGTQTYICNVNHKPSNTKVDKKVEPKSCDKTHTCPPCPAPELLGGPSVFLFPPKPKDTYITRETPEVTCVVVDVSHEDPEVKFNWYVDGVEVHNAKTKPREEQYGSTYRVVSVLTVLHQDWLNGKEYKCKVSNKALPAPIEKTISKAKGQPREPQVYTLPPSRDELTKNQVSLWCLVKGFYPSDIAVEWESNGQPENNYKTTPPVLDSDGSFFLYSKLTVDKSRWQQGNVFSCSVMHEALHNHYTQKSLSLSPGK

SEQ ID NO: 740 - protein, 453 aa, artificial
  Synthetic polypeptide
QLQLQESGPGLVKPSETLSLTCTVSGGSISTSSYYWGWIRQPPGKGLEWIGSIYYTGNTYYNPSLKSRVTISVDTSKNQFSLKLSSVTAADTAVYYCARVRYGVGVPRYFDPWGQGTLVTVSSASTKGPSVFPLAPSSKSTSGGTAALGCLVKDYFPEPVTVSWNSGALTSGVHTFPAVLQSSGLYSLSSVVTVPSSSLGTQTYICNVNHKPSNTKVDKKVEPKSCDKTHTCPPCPAPELLGGPSVFLFPPKPKDTLMISRTPEVTCVVVDVSHEDPEVKFNWYVDGVEVHNAKTKPREEQYGSTYRVVSVLTVLHQDWLNGKEYKCKVSNKALPAPIEKTISKAKGQPREPQVYTLPPSRDELTKNQVSLSCAVKGFYPSDIAVEWESNGQPENNYKTTPPVLDSDGSFFLVSKLTVDKSRWQQGNVFSCSVMHEALHNHYTQKSLSLSPGK

SEQ ID NO: 741 - protein, 452 aa, artificial
  Synthetic polypeptide
QLQLQESGPGLVKPSETLSLTCTVSGGSISTSSYYWGWIRQPPGKGLEWIGSIYYTGNTYYNPSLKSRVTISVDTSKNQFSLKLSSVTAADTAVYYCARVRYGVGVPRYFDPWGQGTLVTVSSASTKGPSVFPLAPSSKSTSGGTAALGCLVKDYFPEPVTVSWNSGALTSGVHTFPAVLQSSGLYSLSSVVTVPSSSLGTQTYICNVNHKPSNTKVDKKVEPKSCDKTHTCPPCPAPELLGGPSVFLFPPKPKDTYITRETPEVTCVVVDVSHEDPEVKFNWYVDGVEVHNAKTKPREEQYGSTYRVVSVLTVLHQDWLNGKEYKCKVSNKALPAPIEKTISKAKGQPREPQVYTLPPSRDELTKNQVSLSCAVKGFYPSDIAVEWESNGQPENNYKTTPPVLDSDGSFFLVSKLTVDKSRWQQGNVFSCSVMHEALHNHYTQKSLSLSPG

SEQ ID NO: 742 - protein, 453 aa, artificial
  Synthetic polypeptide
QLQLQESGPGLVKPSETLSLTCTVSGGSISTSSYYWGWIRQPPGKGLEWIGSIYYTGNTYYNPSLKSRVTISVDTSKNQFSLKLSSVTAADTAVYYCARVRYGVGVPRYFDPWGQGTLVTVSSASTKGPSVFPLAPSSKSTSGGTAALGCLVKDYFPEPVTVSWNSGALTSGVHTFPAVLQSSGLYSLSSVVTVPSSSLGTQTYICNVNHKPSNTKVDKKVEPKSCDKTHTCPPCPAPELLGGPSVFLFPPKPKDTYITRETPEVTCVVVDVSHEDPEVKFNWYVDGVEVHNAKTKPREEQYGSTYRVVSVLTVLHQDWLNGKEYKCKVSNKALPAPIEKTISKAKGQPREPQVYTLPPSRDELTKNQVSLSCAVKGFYPSDIAVEWESNGQPENNYKTTPPVLDSDGSFFLVSKLTVDKSRWQQGNVFSCSVMHEALHNHYTQKSLSLSPGK

SEQ ID NO: 743 - protein, 452 aa, artificial
  Synthetic polypeptide
QLQLQESGPGLVKPSETLSLTCTVSGGSITSSNYYWGWIRQPPGKGLEWIGSIDYTGSTYYNPSLKSRVTISVDTSKNQFSLKLSSVTAADTAVYYCARGKYYETYLGFDVWGQGTLVTVSSASTKGPSVFPLAPSSKSTSGGTAALGCLVKDYFPEPVTVSWNSGALTSGVHTFPAVLQSSGLYSLSSVVTVPSSSLGTQTYICNVNHKPSNTKVDKKVEPKSCDKTHTCPPCPAPELLGGPSVFLFPPKPKDTLMISRTPEVTCVVVDVSHEDPEVKFNWYVDGVEVHNAKTKPREEQYGSTYRVVSVLTVLHQDWLNGKEYKCKVSNKALPAPIEKTISKAKGQPREPQVYTLPPSRDELTKNQVSLTCLVKGFYPSDIAVEWESNGQPENNYKTTPPVLDSDGSFFLYSKLTVDKSRWQQGNVFSCSVMHEALHNHYTQKSLSLSPGK

SEQ ID NO: 744 - protein, 451 aa, artificial
  Synthetic polypeptide
QLQLQESGPGLVKPSETLSLTCTVSGGSITSSNYYWGWIRQPPGKGLEWIGSIDYTGSTYYNPSLKSRVTISVDTSKNQFSLKLSSVTAADTAVYYCARGKYYETYLGFDVWGQGTLVTVSSASTKGPSVFPLAPSSKSTSGGTAALGCLVKDYFPEPVTVSWNSGALTSGVHTFPAVLQSSGLYSLSSVVTVPSSSLGTQTYICNVNHKPSNTKVDKKVEPKSCDKTHTCPPCPAPELLGGPSVFLFPPKPKDTLYITREPEVTCVVVDVSHEDPEVKFNWYVDGVEVHNAKTKPREEQYGSTYRVVSVLTVLHQDWLNGKEYKCKVSNKALPAPIEKTISKAKGQPREPQVYTLPPSRDELTKNQVSLTCLVKGFYPSDIAVEWESNGQPENNYKTTPPVLDSDGSFFLYSKLTVDKSRWQQGNVFSCSVMHEALHNHYTQKSLSLSPG

SEQ ID NO: 745 - protein, 452 aa, artificial
  Synthetic polypeptide
QLQLQESGPGLVKPSETLSLTCTVSGGSITSSNYYWGWIRQPPGKGLEWIGSIDYTGSTYYNPSLKSRVTISVDTSKNQFSLKLSSVTAADTAVYYCARGKYYETYLGFDVWGQGTLVTVSSASTKGPSVFPLAPSSKSTSGGTAALGCLVKDYFPEPVTVSWNSGALTSGVHTFPAVLQSSGLYSLSSVVTVPSSSLGTQTYICNVNHKPSNTKVDKKVEPKSCDKTHTCPPCPAPELLGGPSVFLFPPKPKDTLYITREPEVTCVVVDVSHEDPEVKFNWYVDGVEVHNAKTKPREEQYGSTYRVVSVLTVLHQDWLNGKEYKCKVSNKALPAPIEKTISKAKGQPREPQVYTLPPSRDELTKNQVSLTCLVKGFYPSDIAVEWESNGQPENNYKTTPPVLDSDGSFFLYSKLTVDKSRWQQGNVFSCSVMHEALHNHYTQKSLSLSPGK

SEQ ID NO: 746 - protein, 452 aa, artificial
  Synthetic polypeptide
QLQLQESGPGLVKPSETLSLTCTVSGGSITSSNYYWGWIRQPPGKGLEWIGSIDYTGSTYYNPSLKSRVTISVDTSKNQFSLKLSSVTAADTAVYYCARGKYYETYLGFDVWGQGTLVTVSSASTKGPSVFPLAPSSKSTSGGTAALGCLVKDYFPEPVTVSWNSGALTSGVHTFPAVLQSSGLYSLSSVVTVPSSSLGTQTYICNVNHKPSNTKVDKKVEPKSCDKTHTCPPCPAPELLGGPSVFLFPPKPKDTLMISRTPEVTCVVVDVSHEDPEVKFNWYVDGVEVHNAKTKPREEQYGSTYRVVSVLTVLHQDWLNGKEYKCKVSNKALPAPIEKTISKAKGQPREPQVYTLPPSRDELTKNQVSLWCLVKGFYPSDIAVEWESNGQPENNYKTTPPVLDSDGSFFLYSKLTVDKSRWQQGNVFSCSVMHEALHNHYTQKSLSLSPGK

SEQ ID NO: 747 - protein, 451 aa, artificial
  Synthetic polypeptide
QLQLQESGPGLVKPSETLSLTCTVSGGSITSSNYYWGWIRQPPGKGLEWIGSIDYTGSTYYNPSLKSRVTISVDTSKNQFSLKLSSVTAADTAVYYCARGKYYETYLGFDVWGQGTLVTVSSASTKGPSVFPLAPSSKSTSGGTAALGCLVKDYFPEPVTVSWNSGALTSGVHTFPAVLQSSGLYSLSSVVTVPSSSLGTQTYICNVNHKPSNTKVDKKVEPKSCDKTHTCPPCPAPELLGGPSVFLFPPKPKDTLYITREPEVTCVVVDVSHEDPEVKFNWYVDGVEVHNAKTKPREEQYGSTYRVVSVLTVLHQDWLNGKEYKCKVSNKALPAPIEKTISKAKGQPREPQVYTLPPSRDELTKNQVSLWCLVKGFYPSDIAVEWESNGQPENNYKTTPPVLDSDGSFFLYSKLTVDKSRWQQGNVFSCSVMHEALHNHYTQKSLSLSPG

SEQ ID NO: 748 - protein, 452 aa, artificial
  Synthetic polypeptide
QLQLQESGPGLVKPSETLSLTCTVSGGSITSSNYYWGWIRQPPGKGLEWIGSIDYTGSTYYNPSLKSRVTISVDTSKNQFSLKLSSVTAADTAVYYCARGKYYETYLGFDVWGQGTLVTVSSASTKGPSVFPLAPSSKSTSGGTAALGCLVKDYFPEPVTVSWNSGALTSGVHTFPAVLQSSGLYSLSSVVTVPSSSLGTQTYICNVNHKPSNTKVDKKVEPKSCDKTHTCPPCPAPELLGGPSVFLFPPKPKDTLYITREPEVTCVVVDVSHEDPEVKFNWYVDGVEVHNAKTKPREEQYGSTYRVVSVLTVLHQDWLNGKEYKCKVSNKALPAPIEKTISKAKGQPREPQVYTLPPSRDELTKNQVSLWCLVKGFYPSDIAVEWESNGQPENNYKTTPPVLDSDGSFFLYSKLTVDKSRWQQGNVFSCSVMHEALHNHYTQKSLSLSPGK

SEQ ID NO: 749 - protein, 452 aa, artificial
  Synthetic polypeptide
QLQLQESGPGLVKPSETLSLTCTVSGGSITSSNYYWGWIRQPPGKGLEWIGSIDYTGSTYYNPSLKSRVTISVDTSKNQFSLKLSSVTAADTAVYYCARGKYYETYLGFDVWGQGTLVTVSSASTKGPSVFPLAPSSKSTSGGTAALGCLVKDYFPEPVTVSWNSGALTSGVHTFPAVLQSSGLYSLSSVVTVPSSSLGTQTYICNVNHKPSNTKVDKKVEPKSCDKTHTCPPCPAPELLGGPSVFLFPPKPKDTLMISRTPEVTCVVVDVSHEDPEVKFNWYVDGVEVHNAKTKPREEQYGSTYRVVSVLTVLHQDWLNGKEYKCKVSNKALPAPIEKTISKAKGQPREPQVYTLPPSRDELTKNQVSLSCAVKGFYPSDIAVEWESNGQPENNYKTTPPVLDSDGSFFLVSKLTVDKSRWQQGNVFSCSVMHEALHNHYTQKSLSLSPGK

SEQ ID NO: 750 - protein, 451 aa, artificial
  Synthetic polypeptide
QLQLQESGPGLVKPSETLSLTCTVSGGSITSSNYYWGWIRQPPGKGLEWIGSIDYTGSTYYNPSLKSRVTISVDTSKNQFSLKLSSVTAADTAVYYCARGKYYETYLGFDVWGQGTLVTVSSASTKGPSVFPLAPSSKSTSGGTAALGCLVKDYFPEPVTVSWNSGALTSGVHTFPAVLQSSGLYSLSSVVTVPSSSLGTQTYICNVNHKPSNTKVDKKVEPKSCDKTHTCPPCPAPELLGGPSVFLFPPKPKDTLYITREPEVTCVVVDVSHEDPEVKFNWYVDGVEVHNAKTKPREEQYGSTYRVVSVLTVLHQDWLNGKEYKCKVSNKALPAPIEKTISKAKGQPREPQVYTLPPSRDELTKNQVSLSCAVKGFYPSDIAVEWESNGQPENNYKTTPPVLDSDGSFFLVSKLTVDKSRWQQGNVFSCSVMHEALHNHYTQKSLSLSPG

SEQ ID NO: 751 - protein, 452 aa, artificial
  Synthetic polypeptide
QLQLQESGPGLVKPSETLSLTCTVSGGSITSSNYYWGWIRQPPGKGLEWIGSIDYTGSTYYNPSLKSRVTISVDTSKNQFSLKLSSVTAADTAVYYCARGKYYETYLGFDVWGQGTLVTVSSASTKGPSVFPLAPSSKSTSGGTAALGCLVKDYFPEPVTVSWNSGALTSGVHTFPAVLQSSGLYSLSSVVTVPSSSLGTQTYICNVNHKPSNTKVDKKVEPKSCDKTHTCPPCPAPELLGGPSVFLFPPKPKDTLYITREPEVTCVVVDVSHEDPEVKFNWYVDGVEVHNAKTKPREEQYGSTYRVVSVLTVLHQDWLNGKEYKCKVSNKALPAPIEKTISKAKGQPREPQVYTLPPSRDELTKNQVSLSCAVKGFYPSDIAVEWESNGQPENNYKTTPPVLDSDGSFFLVSKLTVDKSRWQQGNVFSCSVMHEALHNHYTQKSLSLSPGK

What is claimed is:

1. An anti-IL-36 antibody comprising: (i) a first light chain hypervariable region (HVR-L1), a second light chain hypervariable region (HVR-L2), and a third light chain hypervariable region (HVR-L3), and/or (ii) a first heavy chain hypervariable region (HVR-H1), a second heavy chain hypervariable region (HVR-H2), and a third heavy chain hypervariable region (HVR-H3); wherein:
(a) HVR-L1 comprises an amino acid sequence selected from TGSSSNIGAHYDVH (SEQ ID NO: 18), TGSSSNIGAGYDVH (SEQ ID NO: 22), RASQSVSSNYLA (SEQ ID NO: 38), or RASQTIYKYLN (SEQ ID NO: 42);
(b) HVR-L2 comprises an amino acid sequence selected from SNNNRPS (SEQ ID NO: 15), GNDNRPS (SEQ ID NO: 19), GNTNRPS (SEQ ID NO: 23), GNRNRPS (SEQ ID NO: 27), SASSLQS (SEQ ID NO: 39), or AASSLQS (SEQ ID NO: 43);
(c) HVR-L3 comprises an amino acid sequence selected from QSYDYSLRGYV (SEQ ID NO: 16), QSYDYSLSGYV (SEQ ID NO: 20), QSYDYSLRVYV (SEQ ID NO: 28), QSYDYSLKAYV (SEQ ID NO: 32), QSYDISLSGWV (SEQ ID NO: 36), QQTYSYPPT (SEQ ID NO: 40), or QQSSIPYT (SEQ ID NO: 44);
(d) HVR-H1 comprises an amino acid sequence selected from SAYAMHW (SEQ ID NO: 46), STSSYYW (SEQ ID NO: 50), SSTSYYW (SEQ ID NO: 54), GSRSYYW (SEQ ID NO: 58), STYAMSW (SEQ ID NO: 62), TSSNYYW (SEQ ID NO: 66), SSYGMH (SEQ ID NO: 70), SNYAIS (SEQ ID NO: 74), TSTNYYW (SEQ ID NO: 82), TSSNAYW (SEQ ID NO: 86), TASNYYW (SEQ ID NO: 90), TASNTYW (SEQ ID NO: 106), SDSSYYW (SEQ ID NO: 122), SESSYYW (SEQ ID NO: 126), STSSDYW (SEQ ID NO: 130), SNSSYYW (SEQ ID NO: 134), STSSYHW (SEQ ID NO: 142), SRSSYYW (SEQ ID NO: 146), XXXNXYX (SEQ ID NO: 251) wherein X at position 1 is T, D, E, or N; X at position 2 is S, A, E, G, K, Q, R, or T; X at position 3 is S, A, D, E, G, N, P, Q, or T; X at position 5 is Y, A, E, G, H, M, N, Q, S, T, or V; X at position 7 is W, F, I, V, or Y, or XXXXXXW (SEQ ID NO: 336) wherein X at position 1 is S or D; X at position 2 is T, A, D, E, G, H, K, N, P, Q, R, or S; X at position 3 is S, D, E, G, K, N, P, or R; X at position 4 is S, G, K, N, or P; X at position 5 is Y, A, D, E, G, H, M, N, Q, S, T, V, or W; X at position 6 is Y, A, F, G, H, M, N, or Q;
(e) HVR-H2 comprises an amino acid sequence selected from VISYDGTNEYYAD (SEQ ID NO: 47), SIYYTGNTYYNP (SEQ ID NO: 51), SIHYSGNTYYNP (SEQ ID NO: 55), SIHYSGTTYYNP (SEQ ID NO: 59), GISGGSGYTYYAD (SEQ ID NO: 63), SIDYTGSTYYNP (SEQ ID NO: 67), VISYGGSERYYAD (SEQ ID NO: 71), GILPILGTVDYAQ (SEQ ID NO: 75), NIDYTGSTYYNA (SEQ ID NO: 83), SIDYTGSTAYNP (SEQ ID NO: 87), SIDYTGSTYYNT (SEQ ID NO: 91), SIDYTGSTYYEP (SEQ ID NO: 99), SIDYTGSTYYEP (SEQ ID NO: 103), SIDYTGSTYYQP (SEQ ID NO: 119), SIYYTGNTYYNS (SEQ ID NO: 123), SIYYTGNTYYLP (SEQ ID NO: 131), SIYYTGNTYYMP (SEQ ID NO: 143), SIYYTGNTYYWP (SEQ ID NO: 147), SIYYTGETYYAP (SEQ ID NO: 151), XXDXXXXXXYXX (SEQ ID NO: 284) wherein X at position 1 is S, N, or T; X at position 2 is I, M, or V; X at position 4 is Y, or H; X at position 5 is T, H, L, or N; X at position 6 is G, A, D, E, H, K, N, Q, R, S, or T; X at position 7 is S, A, D, Q, or T; X at position 8 is T, A, D, or E; X at position 9 is Y, A, F, Q, S, or W; X at position 11 is N, D, E, H, P, or Q; X at position 12 is P, A, or E, or XXXXXXXXXYXP (SEQ ID NO: 379) wherein X at position 1 is S, F, I, M, or Q; X at position 2 is I, A, G, L, R, S, T, or V; X at position 3 is Y, A, D, E, F, G, H, K, L, M, N, P, Q, R, S, T, or W; X at position 4 is Y, A, D, E, F, G, H, K, N, P, Q, R, S, T, or W; X at position 5 is T, D, E, K, N, P, or Q; X at position 6 is G or Q; X at position 7 is N, D, E, G, H, I, K, M, P, R, or S; X at position 8 is T, A, E, F, G, H, K, P, Q, R, S, V, W, or Y; X at position 9 is Y or W; X at position 11 is N, A, D, E, K, L, M, P, Q, S or T;
(f) HVR-H3 comprises an amino acid sequence selected from ARGIRIFTSYFDS (SEQ ID NO: 48), ARVRYGVGVPRYFDP (SEQ ID NO: 52), ARVHYGGYIPRRFDH (SEQ ID NO: 56), ARVAPSYPRVFDY (SEQ ID NO: 60), ARVVTYRDPPASFDY (SEQ ID NO: 64), ARGKYYETYLGFDV (SEQ ID NO: 68), AREPWYSSRGWTGYGFDV (SEQ ID NO: 72), AREPWYRLGAFDV (SEQ ID NO: 76), ATGKYYETYLGFDV (SEQ ID NO: 84), AHGKYYETYLGFDV (SEQ ID NO: 88), ATGSYYETYLGFDV (SEQ ID NO: 100), ATGNYYETYLGFDV (SEQ ID NO: 104), ASGKYYETYLGFDV (SEQ ID NO: 112), ARGNYYETYLGFDV (SEQ ID NO: 120), AGVRYGVGVPRYFDP (SEQ ID NO: 128), SRVRYGVGVPRYFDP (SEQ ID NO: 132), VRVRYGVGVPRYFDP (SEQ ID NO: 144), TRVRYGVGVPRYFDP (SEQ ID NO: 148), ARLRYGVGVPRYFDP (SEQ ID NO: 152), ARVKYGVGVPRYFDP (SEQ ID NO: 156), ARVRYGVGVPRHFDP (SEQ ID NO: 160), AXGXYYXTYLGFDV (SEQ ID NO: 322) wherein X at position 2 is R, A, E, G, H, M, N, Q, S, T, or Y; X at position 4 is K, A, or S; X at position 7 is E or T, or XXXXXGXXVPRXFDP (SEQ ID NO: 462) wherein X at position 1 is A or V; X at position 2 is R, A, G, N, Q, or T; X at position 3 is V, A, F, I, K, L, M, Q, or S; X at position 4 is R, A, I, K, L, M, P, Q, S, T, or V; X at position 5 is Y, H, I, L, or V; X at position 7 is V, A, F, G, K, M, N, Q, R, S, T, W, or Y; X at position 8 is G, N, R, S, or T; X at position 12 is Y, F, H, I, L, M, Q, or R.

2. The antibody of claim 1, wherein:
(a) HVR-L1 comprises the amino acid sequence of SEQ ID NO: 18;
(b) HVR-L2 comprises the amino acid sequence of SEQ ID NO: 19; and
(c) HVR-L3 comprises the amino acid sequence of SEQ ID NO: 20.

3. The antibody of claim 1, wherein:
(a) HVR-H1 comprises the amino acid sequence selected from SEQ ID NO: 66, 82, 86, 90, or 252-283;
(b) HVR-H2 comprises the amino acid sequence selected from SEQ ID NO: 67, 83, 87, 91, 99, 103, 119, or 285-321; and
(c) HVR-H3 comprises the amino acid sequence selected from SEQ ID NO: 68, 84, 88, 100, 104, 112, 120, or 323-335.

4. The antibody of claim 1, wherein:
(a) HVR-H1 comprises an amino acid sequence selected from SEQ ID NO: 50, 122, 126, 130, 134, 138, 142, 146, or 337-378;
(b) HVR-H2 comprises an amino acid sequence selected from SEQ ID NO: 51, 123, 131, 143, 147, 151, or 380-461; and
(c) HVR-H3 comprises an amino acid sequence selected from SEQ ID NO: 52, 128, 132, 144, 148, 152, 156, 160, or 463-513.

5. The antibody of claim 1, wherein the antibody comprises a light chain variable domain (V_{L}) amino acid sequence having at least 90% identity to a sequence selected from SEQ ID NO: 13, 17, 21, 25, 29, 33, 37, 41, 77, or 78; and/or a heavy chain variable domain (V_{H}) amino acid sequence having at least 90% identity to a sequence selected from SEQ ID NO: 45, 49, 53, 57, 61, 65, 69, 73, 79, 80, 81, 85, 89, 93, 97, 101, 105, 109, 113, 117, 121, 125, 129, 133, 137, 141, 145, 149, 153, 157, 161, or 165.

6. The antibody of claim 1, wherein the antibody comprises a light chain variable domain (V_{L}) amino acid sequence having at least 90% identity to SEQ ID NO: 17 or 77; and/or
a heavy chain variable domain (V_{H}) amino acid sequence having at least 90% identity to a sequence selected from SEQ ID NO: 49, 65, 79, 80, 81, 85, 89, 93, 97, 101, 105, 109, 113, 117, 121, 125, 129, 133, 137, 141, 145, 149, 153, 157, 161, or 165;
a heavy chain variable domain (V_{H}) amino acid sequence having at least 90% identity to a sequence selected from SEQ ID NO: 65, 80, 81, 85, 89, 93, 97, 101, 105, 109, 113, or 117; or
a heavy chain variable domain (V_{H}) amino acid sequence having at least 90% identity to a sequence selected from SEQ ID NO: 49, 79, 121, 125, 129, 133, 137, 141, 145, 149, 153, 157, 161, or 165.

7. The antibody of claim 1, wherein the antibody comprises:
a light chain (LC) amino acid sequence having at least 90% identity to SEQ ID NO: 169 or 242; and/or a heavy chain (HC) amino acid sequence having at least 90% identity to a sequence selected from SEQ ID NO: 170-202, 248-250, 518-616, and 743-751; or
a light chain (LC) amino acid sequence having at least 90% identity to SEQ ID NO: 169 or 242; and/or a heavy chain (HC) amino acid sequence having at least 90% identity to a sequence selected from SEQ ID NO: 203-241, and 617-733.

8. The antibody of claim 1, wherein the antibody is a multispecific antibody comprising:
(a) a pair of light chains each comprising: HVR-L1 sequence of SEQ ID NO: 18; HVR-L2 sequence of SEQ ID NO: 19; and HVR-L3 sequence of SEQ ID NO: 20;
(b) a heavy chain comprising: HVR-H1 sequence selected from SEQ ID NOs: 66, 82, 86, 90, or 106; HVR-H2 sequence selected from SEQ ID NOs: 67, 83, 87, 91, 99, 103, or 119; and HVR-H3 sequence selected from SEQ ID NOs: 68, 84, 88, 100, 104, 112, or 120; and
(c) a heavy chain comprising: HVR-H1 sequence selected from SEQ ID NOs: 50, 122, 126, 130, 134, 142, or 146; HVR-H2 sequence selected from SEQ ID NOs: 51, 123, 127, 131, 135, 139, 143, 147, or 151; and HVR-H3 comprises an amino acid sequence selected from SEQ ID NOs: 52, 128, 132, 144, 148, 152, 156, or 160; optionally, wherein:
one of the heavy chains comprises an amino acid substitution T366W and the other heavy chain comprises amino acid substitutions T366S, L368A and Y407V; and/or
the antibody comprises:
(a) a pair of light chains each comprising a light chain variable domain (V_{L}) amino acid sequence of SEQ ID NO: 17 or 77;
(b) a heavy chain comprising a heavy chain variable domain (V_{H}) amino acid sequence selected from SEQ ID NO: 65, 80, 81, 85, 89, 93, 97, 101, 105, 109, 113, or 117; and
(c) a heavy chain comprising a heavy chain variable domain (V_{H}) amino acid sequence selected from SEQ ID NO: 49, 79, 121, 125, 129, 133, 137, 141, 145, 149, 153, 157, 161, or 165.

9. The antibody of claim 1, wherein the antibody binds to hu-IL-36α, hu-IL-36-β, and/or hu-IL-36-γ with a binding affinity of 1×10⁻⁸ M or less, 1×10⁻⁹M or less, 1×10⁻¹⁰ M or less, or 1×10⁻¹¹M or less;
the antibody binds to hu-IL-36α and hu-IL-36-γ with a binding affinity of 1×10⁻⁸ M or less, 1×10⁻⁹M or less, 1×10⁻¹⁰ M or less, or 1×10⁻¹¹M or less;
the antibody binds to hu-IL-36-β with a binding affinity of 1×10⁻⁸ M or less, 1×10⁻⁹M or less, 1×10⁻¹⁰ M or less, or 1×10⁻¹¹M or less;
the antibody decreases an intracellular signal stimulated by IL-36α, IL-36β, and/or IL-36γ by at least 90%, at least 95%, at least 99%, or 100%; optionally, wherein at an IL-36α, IL-36β, and/or IL-36γ concentration of about EC₅₀ the antibody has an IC₅₀ of 10 nM or less, 5 nM or less, or 1 nM or less;
the antibody inhibits release of IL-8 from primary human keratinocytes (PHKs) stimulated by IL-36α, IL-36β, and/or IL-36γ, optionally, wherein at an IL-36α, IL-36β, and/or IL-36γ concentration of about EC₅₀ the antibody has an IC₅₀ of 10 nM or less, 5 nM or less, or 1 nM or less; and/or
the antibody cross-reacts with an IL-36α, IL-36β, or IL-36γ of cynomolgus monkey of SEQ ID NO: 5, 6, or 7.

10. A multispecific antibody that binds to each of human IL-36α, IL-36β, and IL-36γ; optionally, wherein the antibody binds to each of human IL-36α, IL-36β, and IL-36γ with a binding affinity of 3 nM or less; optionally wherein the binding affinity is measured by equilibrium dissociation constant (K_{D}) to a hu-IL-36α of SEQ ID NO:1, a hu-IL-36β of SEQ ID NO:2, and a hu-IL-36γ of SEQ ID NO:3; optionally, wherein the antibody:
(a) comprises a specificity for IL-36α and/or IL-36γ in one arm, and a specificity for IL-36β in the other arm; optionally, wherein one arm binds to hu-IL-36α and hu-IL-36-γ with a binding affinity of 1×10⁻⁹M or less, 1×10⁻¹⁰ M or less, or 1×10⁻¹¹M or less, and the other arm binds to hu-IL-36-β with a binding affinity of 1×10⁻⁹M or less, 1×10⁻¹⁰ M or less, or 1×10⁻¹¹M or less;
(b) decreases an intracellular signal stimulated by IL-36α, IL-36β, and/or IL-36γ by at least 90%, at least 95%, at least 99%, or 100%; optionally, wherein at an IL-36α, IL-36β, and/or IL-36γ concentration of about EC₅₀ the antibody has an IC₅₀ of 10 nM or less, 5 nM or less, or 1 nM or less;
(c) inhibits release of IL-8 from primary human keratinocytes (PHKs) stimulated by IL-36α, IL-36β, and/or IL-36γ, optionally, wherein at an IL-36α, IL-36β, and/or IL-36γ concentration of about EC₅₀ the antibody has an IC₅₀ of 10 nM or less, 5 nM or less, or 1 nM or less;
(d) cross-reacts with an IL-36α, IL-36β, and IL-36γ of cynomolgus monkey; and/or
(e) the antibody binds to each of cynomolgus monkey IL-36α, IL-36β, and IL-36γ with a binding affinity of 3 nM or less; optionally wherein the binding affinity is measured by equilibrium dissociation constant (K_{D}) to a cy-IL-36α of SEQ ID NO:5, a cy-IL-36β of SEQ ID NO:6, and a cy-IL-36γ of SEQ ID NO:7.

11. An isolated polynucleotide or vector encoding the antibody of claim 1; or an isolated host cell comprising the polynucleotide or vector; optionally wherein the host cell is selected from a Chinese hamster ovary (CHO) cell, a myeloma cell (e.g., Y0, NS0, Sp2/0), a monkey kidney cell (COS-7), a human embryonic kidney line (293), a baby hamster kidney cell (BHK), a mouse Sertoli cell (e.g., TM4), an African green monkey kidney cell (VERO-76), a human cervical carcinoma cell (HELA), a canine kidney cell, a human lung cell (W138), a human liver cell (Hep G2), a mouse mammary tumor cell, a TR1 cell, an Medical Research Council 5 (MRC 5) cell, and a Foreskin 4 (FS4) cell.

12. A method of producing an antibody comprising culturing the host cell of claim 11 so that an antibody is produced.

13. A pharmaceutical composition comprising an antibody of claim 1 and a pharmaceutically acceptable carrier.

14. A method of treating a subject, the method comprising administering to the subject a therapeutically effective amount of an antibody of claim 1, or a therapeutically effective amount of a pharmaceutical composition of claim 13; optionally, wherein the disease is selected from: acne due to epidermal growth factor receptor inhibitors, acne and suppurative hidradenitis (PASH), acute generalized exanthematous pustulosis (AGEP), amicrobial pustulosis of the folds, amicrobial pustulosis of the scalp/leg, amicrobial subcorneal pustulosis, aseptic abscess syndrome, Behçet's disease, bowel bypass syndrome, chronic obstructive pulmonary disease (COPD), childhood pustular dermatosis, Crohn's disease, deficiency of the interleukin-1 receptor antagonist (DIRA), deficiency of interleukin-36 receptor antagonist (DITRA), eczema, generalized pustular psoriasis (GPP), erythema elevatum diutinum, hidradenitis suppurativa, IgA pemphigus, inflammatory bowel disease (IBD), neutrophilic panniculitis, palmoplantar pustular psoriasis (PPP), psoriasis, psoriatic arthritis, pustular psoriasis (DIRA, DITRA), pyoderma gangrenosum, pyogenic arthritis pyoderma gangrenosum and acne (PAPA), pyogenic arthritis pyoderma gangrenosum acne and suppurative hidradenitis (PAPASH), rheumatoid neutrophilic dermatosis, synovitis acne pustulosis hyperostosis and osteitis (SAPHO), TNF-induced psoriasis form skin lesions in Crohn's patients, Sjogren's syndrome, Sweet's syndrome, systemic lupus erythematosus (SLE), ulcerative colitis, uveitis, and cancer; optionally, wherein the cancer is selected from breast cancer, colorectal cancer, non-small cell lung cancer, pancreatic cancer.

15. The antibody of claim 1 for use as a medicament; optionally, for use in the treatment of an inflammatory condition.
